(19) United States
(12) Patent Application Publication
(10) Pub. No.: US 2015/0297699 A1
(43) Pub. Date: Oct. 22, 2015

(54) MALARIA ANTIGENS AND METHODS OF USE

(71) Applicant: GENVEC, INC., Gaithersburg, MD (US)

(72) Inventors: Ping Chen, Potomac, MD (US); Duncan McVey, Derwood, MD (US); Douglas Brough, Gaithersburg, MD (US); Joseph Bruder, Gaithersburg, MD (US)

(73) Assignee: GENVEC, INC., Gaithersburg, MD (US)

(21) Appl. No.: 14/441,988

(22) PCT Filed: Nov. 12, 2013
(86) PCT No.: PCT/US2013/069620

§ 371 Date: May 11, 2015

Related U.S. Application Data
(60) Provisional application No. 61/725,248, filed on Nov. 12, 2012.

(51) Int. Cl. A61K 39/015

(52) U.S. Cl. CPC A61K 39/015; A61K 2039/5256

(57) ABSTRACT

The invention is directed to a composition comprising one or more polypeptides or one or more nucleic acid sequences that can induce a protective immune response against Plasmodium species that infect humans. The invention also is directed to a method of using such compositions to induce a protective immune response against a Plasmodium parasite in a mammal.

### STATEMENT REGARDING FEDERALLY SPONSORED RESEARCH AND DEVELOPMENT

[0001] This invention was made with Government support under Grant Number 1R43AQ1084269-01 awarded by the National Institute of Allergy and Infectious Diseases (NIAID). The Government has certain rights in this invention.

### INCORPORATION-BY-REFERENCE OF MATERIAL SUBMITTED ELECTRONICALLY

[0002] Incorporated by reference in its entirety herein is a computer-readable nucleotide/amino acid sequence listing submitted concurrently herewith and identified as follows: One 843,890 Byte ASCII (Text) file named “715570 ST25.txt,” created on Nov. 12, 2013.

### BACKGROUND OF THE INVENTION

[0003] Malaria is one of the most devastating parasitic diseases affecting humans. The Centers for Disease Control (CDC) estimate that over three billion people live in areas at risk of malaria transmission in 106 countries and territories (e.g., parts of Africa, Asia, the Middle East, Central and South America, Hispaniola, and Oceania). The World Health Organization (WHO) and CDC also estimate that in 2010, malaria caused over 200 million clinical episodes 655,000 deaths, with the majority of deaths occurring in Africa. About 86% of the malaria deaths in 2010 occurred in children. On average, 1,500 cases of malaria are reported annually in the United States, and malaria is a major health concern to U.S. military personnel deployed to tropical regions of the world. For example, in August 2003, 28% of the 26th Marine Expeditionary Unit and Joint Task Force briefly deployed to Monrovia, Liberia, were infected with the malaria parasite Plasmodium falciparum. In addition, one 157-man Marine Expeditionary Unit sustained a 44% malaria casualty rate over a 12-day period while stationed at Robert International Airport in Monrovia. In all conflicts during the past century conducted in malaria endemic areas, malaria has been the leading cause of casualties, exceeding enemy-inflicted casualties in its impact on “person-days” lost from duty.

[0004] To combat malaria during U.S. military operations, preventive drugs, insect repellants, and barriers have been used with some success, but developing drug resistance by the malaria parasite and insecticide resistance by mosquito vectors has limited the efficacy of these agents. Moreover, the logistical burden and side effects associated with the use of these agents often is associated with high non-compliance rates. Vaccines are the most cost effective and efficient therapeutic interventions for infectious diseases. In this regard, vaccination has the advantage of administration prior to military deployment and likely reduction in non-compliance risks. However, decades of research and development directed to a malaria vaccine have not proven successful. Recent efforts have focused on developing vaccines against several specific malaria genes and delivery vector systems including adenovirus, poxvirus, and plasmids. The current status of malaria vaccine development and clinical trials is reviewed in, for example, Vaughan et al., Curr. Opin., Immunol., 24(3): 324-331 (2012); Schwartz et al., Malaria Journal, 11: 11 (2012); Tyagi et al., J. Control Release, 162(1): 242-254 (2012); Graves and Gelband, Cochrane Database Syst. Rev., 1: CD000129 (2003); Moore et al., Lancet Infect. Dis., 2: 737-743 (2002); Carvalho et al., Scand. J. Immunol., 56: 327-343 (2002); Moorthy and Hill, Br. Med. Bull., 62: 59-72 (2002); Greenwood and Alonso, Chem. Immunol., 80: 366-395 (2002); and Richie and Saul, Nature, 415: 694-701 (2002).

[0005] An unprecedented quantity of genomic data has emerged from the sequencing and functional genomic analysis of many disease-causing organisms, including malaria. Indeed, it has been determined that the parasite Plasmodium falciparum encodes an estimated 5,268 putative proteins (see Gardner et al., Nature, 419: 498-511 (2002)). This genetic information can be exploited for the systematic discovery of novel antigens for vaccine development. In the past, target antigens for genetic vaccines have been identified based mainly on their abundance in the pathogen of interest and their susceptibility to neutralization by antibodies generated in infected individuals and animal models. This approach has failed to yield effective vaccines against many of the most devastating infectious diseases.

[0006] With regard to malaria, less than 5% of the Plasmodium falciparum genome is represented by antigens currently in clinical development. However, a number of potential vaccine candidates targeted against pre-erythrocytic, erythrocytic and sexual stages of P. falciparum are under various stages of clinical development (see, e.g., Crompton et al., J. Clin. Invest., 120: 4168-4178 (2010)). The RTS,S vaccine is the most clinically advance malaria vaccine. RTS,S is a pre-erythrocytic stage vaccine based on the P. falciparum circumsporozoite protein (CSP), and provides protective efficacy in phase II clinical trials of 30-50% against pathogen challenge (see, e.g., Cesares et al., Vaccine, 28: 4880-4894 (2010); Stoute et al., N Engl. J. Med., 336: 86-91 (1997); Kester et al., Vaccine, 26: 2191-2202 (2008); Kester et al., J. Infect. Dis., 200: 337-346 (2009); Kester et al., Vaccine, 25: 5359-5366 (2007); and Zeeshan et al., PLoS ONE, 7(8): e43430 (2012)). Initial results of phase III clinical trials show that the RTS,S vaccine provides protective efficacies of 56% and 47% against clinical and severe malaria, respectively, in African children age 5 to 17 months (see, e.g., Agnandji et al., N Engl. J. Med., 365: 1863-1875 (2011)). The protection afforded by this protein-based vaccine, however, is short lived (3-8 weeks).

[0007] Other recent efforts at developing a malaria vaccine have focused on several specific genes and their delivery using various different vector systems including adenovirus, poxvirus, and plasmid DNA. It is not apparent, however, whether these recombinant vaccines are effective against malaria, or if they encode the most potent protective antigens. It is clear that protective antigens do exist for the malaria pathogen Plasmodium falciparum, as evidenced by the ability of irradiated sporozoites to induce cellular immune responses in human subjects and robust sterile protection against parasite challenge (see, e.g., Nussenzweig and Nussenzweig, Adv. Immunol., 45: 283-334 (1989), and Hoffinan et al., J. Infect. Dis., 185: 1155-1164 (2002)).

[0008] Thus, there remains a need for compositions containing improved antigens that induce potent protective immunity against challenge with malaria-causing parasites. The invention provides such a composition. This and other advantages of the invention will become apparent from the detailed description provided herein.

### BRIEF SUMMARY OF THE INVENTION

[0009] The invention provides a composition comprising a pharmaceutically acceptable carrier and one or more isolated polypeptides, wherein each of the one or more isolated polypeptides comprises (a) the amino acid sequence of KKERYXIWXRXPKXELHCHLD (SEQ ID NO: 1), wherein X is a lysine (K) residue, a glutamic acid (E) residue, an arginine (R) residue, an isoleucine (I) residue, a leucine (L) residue, a cysteine (C) residue, or a valine (V) residue, (b) the amino acid sequence of KYKEGVVLMEFRYSP (SEQ ID NO: 2), (c) an amino acid sequence comprising at least 20 contiguous amino acid residues of the sequence EDLAKXAVXXKYKEGVVLMEFRYSP (SEQ ID NO: 3), wherein X is a histidine (H) residue, a tryptophan (W) residue, a phenylalanine (F) residue, an isoleucine (I) residue, an asparagine (N) residue, or a glutamic acid (E) residue, or (d) an amino acid sequence comprising at least 20 contiguous amino acid residues of the sequence KSMDTHPIRXLYDAGVKVSVNSDDPGMFL (SEQ ID NO: 4), wherein X is a glutamine (Q) residue, a methionine (M) residue, or a lysine (K) residue, and wherein each of the one or more isolated polypeptides induces a protective immune response against Plasmodium falciparum and/or Plasmodium vivax in a mammal.

[0010] The invention provides a composition comprising a pharmaceutically acceptable carrier and one or more isolated polypeptides, wherein each of the one or more isolated polypeptides comprises (a) an amino acid sequence comprising at least 20 contiguous amino acid residues of the sequence MKKDREPIDEDEMRITSTGRMTNYVNYGAKILG (SEQ ID NO: 20), (b) an amino acid sequence comprising at least 20 contiguous amino acid residues of the sequence KIKATGNAIGKAVTLAEIIKRRFKGLHQIT (SEQ ID NO: 21), or (c) an amino acid sequence comprising SEQ ID NO: 22, and wherein each of the one or more isolated polypeptides induces a protective immune response against Plasmodium falciparum and/or Plasmodium vivax in a mammal.

[0011] The invention provides a composition comprising a pharmaceutically acceptable carrier and one or more isolated polypeptides, wherein each of the one or more isolated polypeptides comprises (a) an amino acid sequence which comprises at least 40 contiguous amino acid residues of the sequence MGKEKTHINLVVIGHVDSGKSTTTGHIIYKLGGIDRRTIEKFEKESAEMGKGSFKYA WVLDKLKAERERGITIDIALWKFETPRYFFTVIDAPGHKDFIKNMITGTSQADVALLV VPAEVGGFEGAFSKEGQTKEHALLAFTLGVKQIVVGVNKMDTVKYSEDRYEEIKKE V (SEQ ID NO: 30), (b) an amino acid sequence which comprises at least 55 contiguous amino acid residues of the sequence DYLKKVGYQADKVDFIPISGFEGDNLIEKSDKTPWYKGRTLIEALDTMEPPKRPYDK PLRIPLQGVYKIGGIGTVPVGRVETGILKAGMVLNFAPSAVVSECKSVEMHKEVLEE ARPGDNIGFNVKNVSVKEIKRGYVASDTKNEPAKGCSKFTAQVIILNHPGEIKNGY (SEQ ID NO: 31), (c) the amino acid sequence of HISCKFLNIDSKIDKRSGKVVEENPK (SEQ ID NO: 32), or (d) an amino acid sequence which comprises at least 20 contiguous amino acid residues of the sequence LEPKKPMVVETFTEYPPLGRFAIRDMRQTIAVGIIK (SEQ ID NO: 33), and wherein each of the one or more isolated polypeptides induces a protective immune response against Plasmodium falciparum and/or Plasmodium vivax in a mammal.

[0012] The invention provides a composition comprising a pharmaceutically acceptable carrier and one or more isolated polypeptides, wherein each of the one or more isolated polypeptides comprises (a) the amino acid sequence of GKVAIILXGKHMGKRCIITK (SEQ ID NO: 40), wherein X is a threonine (T) residue or a serine (S) residue, (b) the amino acid sequence of GKHMGKRCIITKXLXSGLLAVVGPYE (SEQ ID NO: 41), wherein X is an isoleucine (I) residue, a valine (V) residue, an asparagine (N) residue, or a threonine (T) residue, (c) the amino acid sequence of SGLLAVVGPYEXNGVPLKRV (SEQ ID NO: 42), wherein X is a valine (V) residue or an isoleucine (I) residue, and wherein each of the one or more isolated polypeptides induces a protective immune response against Plasmodium falciparum and/or Plasmodium vivax in a mammal.

[0013] The invention provides a composition comprising a pharmaceutically acceptable carrier and one or more isolated polypeptides, wherein each of the one or more isolated polypeptides comprises (a) an amino acid sequence comprising at least 20 contiguous amino acid residues of the sequence LEKKMQLKKEGKLLSAKAKEEKKK (SEQ ID NO: 55), (b) an amino acid sequence comprising at least 21 contiguous amino acid residues of the sequence IVCILGHVDTGKTKLLDKLRHTNVQDNEAGGITQQIGATFFPKD (SEQ ID NO: 56), (c) an amino acid sequence comprising at least 21 contiguous amino acid residues of the sequence SKGIMIIDTPGHESFYNLRKRGS SLCDIAILVIDLMHGLEQQTKESIQILKQRNCPFVIA LNKIDRLYMW (SEQ ID NO: 57), (d) an amino acid sequence comprising at least 20 contiguous amino acid residues of the sequence KLECTVLEVKNIEGLGTTIDVILTNG (SEQ ID NO: 58), (e) the amino acid sequence of GVGLYVMASTLGSLEALLIFL (SEQ ID NO: 59), and (f) an amino acid sequence comprising at least 20 contiguous amino acid residues of the sequence MTDVSDVFNHVDKXGVGLYVMASTLGSLEALLIFL (SEQ ID NO: 60), wherein X is a serine (S) residue or a threonine (T) residue, and wherein each of the one or more isolated polypeptides induces a protective immune response against Plasmodium falciparum and/or Plasmodium vivax in a mammal.

[0014] The invention provides a composition comprising a pharmaceutically acceptable carrier and one or more isolated polypeptides, wherein each of the one or more isolated polypeptides comprises (a) the amino acid sequence of NLFFAKQVIPNACATQAILSI (SEQ ID NO: 69), or (b) the amino acid sequence of NFDSXMKGLTLSNCXFLRNIHN (SEQ ID NO: 70), wherein X is a serine (S) residue, a threonine (T) residue, or an asparagine (N) residue, and wherein each of the one or more isolated polypeptides induces a protective immune response against Plasmodium falciparum and/or Plasmodium vivax in a mammal.

[0015] The invention provides a composition comprising a pharmaceutically acceptable carrier and one or more isolated polypeptides, wherein each of the one or more isolated polypeptides comprises (a) the amino acid sequence of SGWKFEEQEGDVNMVLTKNVD (SEQ ID NO: 80), (b) an amino acid sequence comprising at least 20 contiguous amino acid residues of the sequence IIDFQLVSPFQAEGENEAQAEMTDFSVTVEKPN (SEQ ID NO: 81), (c) an amino acid sequence comprising at least 20 contiguous amino acid residues of the sequence GGITFYCTTLQNDEKFRYMIGNVKYYKNEEGKNSVS (SEQ ID NO: 82), and (d) an amino acid sequence comprising at least 21 contiguous amino acid residues of the sequence YNGPEFEDLDDSLQTSLDEWLANLGVDSELCDFIDSCSIDKEQREYM (SEQ ID NO: 83), and wherein each of the one or more isolated polypeptides induces a protective immune response against Plasmodium falciparum and/or Plasmodium vivax in a mammal.

[0016] The invention provides a composition comprising a pharmaceutically acceptable carrier and one or more isolated polypeptides, wherein each of the one or more isolated polypeptides comprises the amino acid sequence of SEQ ID NO: 90, SEQ ID NO: 91, SEQ ID NO: 92, SEQ ID NO: 93, or SEQ ID NO: 202, and wherein each of the one or more isolated polypeptides induces a protective immune response against Plasmodium falciparum and/or Plasmodium vivax in a mammal.

[0017] The invention provides a composition comprising a pharmaceutically acceptable carrier and one or more isolated polypeptides, wherein each of the one or more isolated polypeptides comprises the amino acid sequence of SEQ ID NO: 98, SEQ ID NO: 99, or SEQ ID NO: 100, and wherein each of the one or more isolated polypeptides induces a protective immune response against Plasmodium falciparum and/or Plasmodium vivax in a mammal.

[0018] The invention provides a composition comprising a pharmaceutically acceptable carrier and one or more isolated polypeptides, wherein each of the one or more isolated polypeptides comprises (a) the amino acid sequence of LLKHGWCEMLKGGVIMDVKX (SEQ ID NO: 104), wherein X is an asparagine (N) residue or a serine (S) residue, (b) an amino acid sequence comprising at least 20 contiguous amino acid residues of the sequence VEQAKIAEXAGAIGVMVLENIPSELR (SEQ ID NO: 105), wherein X is a lysine (K) residue or a glutamic acid (E) residue, (c) an amino acid sequence comprising at least 20 contiguous amino acid residues of the sequence SINVLAKVRIGHFVEAQILEELK (SEQ ID NO: 106), (d) an amino acid sequence comprising at least 27 contiguous amino acid residues of the sequence KHKFKTPFVCGCTNLGEALRRXSEGASMIRTKGEAGTGNII (SEQ ID NO: 107), wherein X is an isoleucine (I) residue or a methionine (M) residue, (e) an amino acid sequence comprising at least 20 contiguous amino acid residues of the sequence ATPADAAMCMQLGMDGVFVGSGIFESENP (SEQ ID NO: 108), or (f) an amino acid sequence comprising at least 20 contiguous amino acid residues of the sequence LPVVNFAAGGXATPADAAMCMQLGMDGVFVGSGIFESENP (SEQ ID NO: 109), wherein X is an isoleucine (I) residue or a valine (V) residue, and wherein each of the one or more isolated polypeptides induces a protective immune response against Plasmodium falciparum and/or Plasmodium vivax in a mammal.

[0019] The invention provides composition comprising a pharmaceutically acceptable carrier and one or more isolated nucleic acid sequences, wherein each of the one or more isolated nucleic acid sequences encodes a polypeptide comprising the amino acid sequence of any one of SEQ ID NO: 1-SEQ ID NO: 16, SEQ ID NO: 20-SEQ ID NO: 26, SEQ ID NO: 30-SEQ ID NO: 36, SEQ ID NO: 40-SEQ ID NO: 51, SEQ ID NO: 55-SEQ ID NO: 65, SEQ ID NO: 69-SEQ ID NO: 76, SEQ ID NO: 80-SEQ ID NO: 86, SEQ ID NO: 90-SEQ ID NO: 93, SEQ ID NO: 98-SEQ ID NO: 100, SEQ ID NO: 104-SEQ ID NO: 118, SEQ ID NO: 202, SEQ ID NO: 205, SEQ ID NO: 207-SEQ ID NO: 209, SEQ ID NO: 211, or SEQ ID NO: 212, and wherein each of the one or more isolated polypeptides induces a protective immune response against Plasmodium falciparum and/or Plasmodium vivax in a mammal.

### DETAILED DESCRIPTION OF THE INVENTION

[0020] The invention is predicated, at least in part, on the identification of antigenic polypeptides from Plasmodium parasites that provide protective immunity in mammals against challenge with malaria-causing parasites. In this respect, the invention provides a composition comprising a pharmaceutically acceptable carrier and one or more isolated polypeptides or nucleic acid sequences, each of which comprises or encodes, respectively, a Plasmodium amino acid sequence, wherein the Plasmodium amino acid sequence induces a protective immune response against Plasmodium falciparum and/or Plasmodium vivax in a mammal. The one or more polypeptides are “isolated” in that they are removed from their natural environment (i.e., a Plasmodium parasite).

[0021] Each of the one or more Plasmodium amino acid sequences is a Plasmodium antigen. An “antigen” is a molecule that triggers an immune response in a mammal. An “immune response” can entail, for example, antibody production and/or the activation of immune effector cells. An antigen in the context of the invention can comprise any subunit, fragment, or epitope of any proteinaceous or non-proteinaceous (e.g., carbohydrate or lipid) molecule which provokes an immune response in a mammal. By “epitope” is meant a sequence of an antigen that is recognized by an antibody or an antigen receptor. Epitopes also are referred to in the art as “antigenic determinants.”

[0022] A Plasmodium antigen in the context of the invention can comprise any proteinaceous Plasmodium molecule or portion thereof that provokes a Plasmodium-related immune response in a mammal. A “Plasmodium molecule” is a molecule that is a part of a Plasmodium parasite, is encoded by a nucleic acid sequence of a Plasmodium parasite, or is derived from or synthetically based upon any such molecule. Administration of a Plasmodium antigen that provokes an immune response in accordance with the invention preferably leads to protective immunity against Plasmodium. In this regard, an “immune response” to Plasmodium is an immune response to any one or more Plasmodium antigens.

[0023] The one or more Plasmodium amino acid sequences can be obtained or derived from any Plasmodium species. Preferably, the one or more Plasmodium amino acid sequences are derived or obtained from a Plasmodium species that infects humans and causes malaria. Human-infecting Plasmodium species include P. malariae, P. ovale, P. knowlesi, P. vivax, and P. falciparum. P. vivax and P. falciparum are the most common species, while P. falciparum is the most deadly species of Plasmodium in human.

[0024] Alternatively, each of the one or more Plasmodium amino acid sequences can be an ortholog of an amino acid sequence from a human-infecting Plasmodium species. “Orthologs” or “orthologous genes” are nucleic acid or amino acid sequences that evolved from a common ancestral gene by speciation, and typically retain the same function in the course of evolution. In other words, when a species diverges into two separate species, the copies of a single gene in the two resulting species are said to be “orthologous.” Plasmodium species that infect non-human animals and contain orthologous genes include, for example, rodent-infecting species such as P. vinckei, P. chabaudi, P. yoelii, and P. berghei; and non-human primate-infecting species such as P. knowlesi, P. cynomolgi, P. simiovale, P. fieldi, P. inui, P. brasilianum, P. billbrayi, P. billcollinsi, P. bouillize, P. brasilianum, P. bucki, P. cercopitheci, P. coatneyi, P. coulangesi, P. eylesi, P. fieldi, P. foleyi, P. fragile, P. inui, P. gaboni, P. georgesi, P. girardi, and P. gonderi. In order to advance vaccine discovery, the genomes of a number of Plasmodium species have been sequenced. For example, the complete P. falciparum genome has been sequenced and is disclosed in Gardner et al., Nature, 419: 498-511 (2002). The complete P. vivax genome has been sequenced and is disclosed in Neafsey et al., Nature Genetics, 44: 1046-1050 (2012); Carlton et al., Nature, 455: 757-763 (2008); and Dharia et al., Proc. Natl. Acad. Sci. USA, 107: 20045-20050 (2010). In addition, the complete P. yoelii genome sequence is disclosed in Carlton et al., Nature, 419: 512-9 (2002). Mouse models of malaria infection, in which P. yoelii is the infecting parasite, have been generated (see, e.g., Wiersch et al., Methods in Molecular Medicine, 72: Malaria Methods and Protocols: 57-76 (2002); and Voza et al., Malaria Journal, 9: 362 (2010)), and have been established as reliable models for pre-erythrocytic stage P. falciparum vaccine development (see, e.g., Nussenzweig et al., Nature, 216: 160 (1967); Clyde et al., Am. J. Med. Sci., 266: 169 (1973); Roeckmann et al., Trans R. Soc. Trop. Med. Hyg., 68: 258 (1974); Hoffman et al., J. Inf. Dis., 185: 1155 (2002); Schofield et al., Nature, 330: 64 (1987); Weiss et al., Proc. Natl. Acad. Sci. USA, 85: 573 (1988); Kumar et al., Nature, 444: 937 (2006); Stoute et al., N. Eng. J. Med., 336: 86 (1997)).

[0025] In one embodiment, the composition comprises a pharmaceutically acceptable carrier and one or more isolated polypeptides, wherein each of the one or more isolated polypeptides comprises: (a) the amino acid sequence of KKERYXIWXRXPKXELHCHLD (SEQ ID NO: 1), wherein X is a lysine (K) residue, a glutamic acid (E) residue, an arginine (R) residue, an isoleucine (I) residue, a leucine (L) residue, a cysteine (C) residue, or a valine (V) residue, (b) the amino acid sequence of KYKEGVVLMEFRYSP (SEQ ID NO: 2), (c) an amino acid sequence comprising at least 20 contiguous amino acid residues of the sequence EDLAKXAVXXKYKEGVVLMEFRYSP (SEQ ID NO: 3), wherein X is a histidine (H) residue, a tryptophan (W) residue, a phenylalanine (F) residue, an isoleucine (I) residue, an asparagine (N) residue, or a glutamic acid (E) residue, or (d) an amino acid sequence comprising at least 20 contiguous amino acid residues of the sequence KSMDTHPIRXLYDAGVKVSVNSDDPGMFL (SEQ ID NO: 4), wherein X is a glutamine (Q) residue, a methionine (M) residue, or a lysine (K) residue.

[0026] When the composition comprises an isolated polypeptide comprising the amino acid sequence of SEQ ID NO: 1, X can be any suitable amino acid residue, but preferably is a lysine (K) residue, a glutamic acid (E) residue, an arginine (R) residue, an isoleucine (I) residue, a leucine (L) residue, a cysteine (C) residue, or a valine (V) residue. In this respect, the isolated polypeptide can comprise, for example, the amino acid sequence of KKERYEIWRRIPKVELHCHLD (SEQ ID NO: 5), KKERYKIWKRLPKCELHCHLD (SEQ ID NO: 6), or KKERYKIWKRIPKCELHCHLD (SEQ ID NO: 7). When the composition comprises an amino acid sequence comprising at least 20 contiguous amino acid residues (e.g., 20, 21, 22, 23, 24, or 25 contiguous amino acid residues) of the sequence SEQ ID NO: 3, X can be any suitable amino acid residue, but preferably is a histidine (H) residue, a tryptophan (W) residue, a phenylalanine (F) residue, an isoleucine (I) residue, an asparagine (N) residue, or a glutamic acid (E) residue. In this respect, the isolated polypeptide can comprise, for example, an amino acid sequence comprising at least 20 contiguous amino acid residues of the sequence EDLAKWAVIEKYKEGVVLMEFRYSP (SEQ ID NO: 8), EDLAKHAVFNKYKEGVVLMEFRYSP (SEQ ID NO: 9), or EDLAKHAVFNKYKEGVVLMEFRYSP (SEQ ID NO: 10). In particular, the isolated polypeptide can comprise the amino acid sequence of EDLAKWAVIEKYKEGVVLMEFRYSP (SEQ ID NO: 8), EDLAKHAVFNKYKEGVVLMEFRYSP (SEQ ID NO: 9), or EDLAKHAVFNKYKEGVVLMEFRYSP (SEQ ID NO: 10). When the composition comprises an isolated polypeptide comprising at least 20 contiguous amino acid residues (e.g., 20, 21, 22, 23, 24, 25, 26, 27, 28, or 29 contiguous amino acid residues) of SEQ ID NO: 4, the isolated polypeptide can comprise, for example, at least 20 contiguous amino acid residues of the sequence KSMDTHPIRKLYDAGVKVSVNSDDPGMFL (SEQ ID NO: 11), KSMDTHPIRMLYDAGVKVSVNSDDPGMFL (SEQ ID NO: 12), or KSMDTHPIRQLYDAGVKVSVNSDDPGMFL (SEQ ID NO: 13). In particular, the isolated polypeptide can comprise the amino acid sequence of KSMDTHPIRKLYDAGVKVSVNSDDPGMFL (SEQ ID NO: 11), KSMDTHPIRMLYDAGVKVSVNSDDPGMFL (SEQ ID NO: 12), or KSMDTHPIRQLYDAGVKVSVNSDDPGMFL (SEQ ID NO: 13).

[0027] The composition can comprise one, two, three, or all four, of the aforementioned polypeptides alone or in any combination. In this respect, the composition can comprise any combination of any two of the aforementioned sequences, any combination of any three of the aforementioned sequences, or all four of the aforementioned sequences. In a preferred embodiment, the composition comprises an isolated polypeptide comprising the amino acid sequence of SEQ ID NO: 14, SEQ ID NO: 15, SEQ ID NO: 16, or SEQ ID NO: 209.

[0028] In another embodiment, the composition comprises a pharmaceutically acceptable carrier and one or more isolated polypeptides, wherein each of the one or more isolated polypeptides comprises (a) an amino acid sequence comprising at least 20 contiguous amino acid residues (e.g., 20, 21, 22, 23, 24, 25, 26, 27, 28, 29, 30, 31, 32, or 33 contiguous amino acid residues) of the sequence MKKDREPIDEDEMRITSTGRMTNYVNYGAKILG (SEQ ID NO: 20), (b) an amino acid sequence comprising at least 20 contiguous amino acid residues (e.g., 20, 21, 22, 23, 24, 25, 26, 27, 28, 29, or 30 contiguous amino acid residues) of the sequence KIKATGNAIGKAVTLAEIIKRRFKGLHQIT (SEQ ID NO: 21), or (c) the amino acid sequence of SEQ ID NO: 22.

[0029] When the composition comprises an isolated polypeptide comprising an amino acid sequence comprising at least 20 contiguous amino acid residues of SEQ ID NO: 20, the isolated polypeptide can comprise, for example, the amino acid sequence of SEQ ID NO: 20. When the composition comprises an isolated polypeptide comprising an amino acid sequence comprising at least 20 contiguous amino acid residues of SEQ ID NO: 21, the isolated polypeptide can comprise, for example, the amino acid sequence of SEQ ID NO: 21. When the composition comprises an isolated polypeptide comprising the amino acid sequence of SEQ ID NO: 22, the isolated polypeptide can comprise, for example, the amino acid sequence of KDAGYQPPLDEKYVKEMXPEEIVN (SEQ ID NO: 23), wherein X can be any suitable amino acid residue, but is preferably a serine (S) residue or a threonine (T) residue (i.e., KDAGYQPPLDEKYVKEMXPEEIVN (SEQ ID NO: 211) or KDAGYQPPLDEKYVKEMTPEEIVN (SEQ ID NO: 212)).

[0030] The composition can comprise one, two, or all three of the aforementioned polypeptides alone or in any combination. In this respect, the composition can comprise any combination of any two of the aforementioned sequences, or all three of the aforementioned sequences. In a preferred embodiment, the composition comprises an isolated polypeptide comprising the amino acid sequence of SEQ ID NO: 24, SEQ ID NO: 25, or SEQ ID NO: 26.

[0031] In another embodiment, the composition comprises a pharmaceutically acceptable carrier and one or more isolated polypeptides, wherein each of the one or more isolated polypeptides comprises (a) an amino acid sequence which comprises at least 40 contiguous amino acid residues of the sequence MGKEKTHINLVVIGHVDSGKSTTTGHIIYKLGGIDRRTIEKFEKESAEMGKGSFKYA WVLDKLKAERERGITIDIALWKFETPRYFFTVIDAPGHKDFIKNMITGTSQADVALLV VPAEVGGFEGAFSKEGQTKEHALLAFTLGVKQIVVGVNKMDTVKYSEDRYEEIKKE V (SEQ ID NO: 30), (b) an amino acid sequence which comprises at least 55 contiguous amino acid residues of the sequence DYLKKVGYQADKVDFIPISGFEGDNLIEKSDKTPWYKGRTLIEALDTMEPPKRPYDK PLRIPLQGVYKIGGIGTVPVGRVETGILKAGMVLNFAPSAVVSECKSVEMHKEVLEE ARPGDNIGFNVKNVSVKEIKRGYVASDTKNEPAKGCSKFTAQVIILNHPGEIKNGY (SEQ ID NO: 31), (c) the amino acid sequence of HISCKFLNIDSKIDKRSGKVVEENPK (SEQ ID NO: 32), or (d) an amino acid sequence which comprises at least 20 contiguous amino acid residues of the sequence LEPKKPMVVETFTEYPPLGRFAIRDMRQTIAVGIIK (SEQ ID NO: 33).

[0032] When the composition comprises an isolated polypeptide comprising at least 40 contiguous amino acid residues (e.g., 40, 45, 50, 55, 60, 65, 70, 75, 80, 85, 90, 95, 100, 105, 110, 115, 120, 125, 130, 135, 140, 145, 150 155, 160, 165, 170, or 172 contiguous amino acid residues) of SEQ ID NO: 30, the isolated polypeptide can comprise, for example, SEQ ID NO: 30. When the composition comprises an isolated polypeptide comprising at least 55 contiguous amino acid residues (e.g., 55, 60, 65, 70, 75, 80, 85, 90, 95, 100, 105, 110, 115, 120, 125, 130, 135, 140, 145, 150 155, 160, 165, or 170 contiguous amino acid residues) of SEQ ID NO: 31, the isolated polypeptide can comprise, for example, SEQ ID NO: 31. When the composition comprises an isolated polypeptide comprising at least 20 contiguous amino acid residues (e.g., 20, 21, 22, 23, 24, 25, 26, 27, 28, 29, 30, 31, 32 or 33 contiguous amino acid residues) of SEQ ID NO: 33, the isolated polypeptide can comprise, for example, SEQ ID NO: 33.

[0033] The composition can comprise one, two, three or all four of the aforementioned polypeptides alone or in any combination. In this respect, the composition can comprise any combination of any two of the aforementioned sequences, any combination of any three of the aforementioned sequences, or all four of the aforementioned sequences. In a preferred embodiment, the composition comprises an isolated polypeptide comprising the amino acid sequence of SEQ ID NO: 34, SEQ ID NO: 35, or SEQ ID NO: 36.

[0034] In another embodiment, the composition comprises a pharmaceutically acceptable carrier and one or more isolated polypeptides, wherein each of the one or more isolated polypeptides comprises (a) the amino acid sequence of GKVAIILXGKHMGKRCIITK (SEQ ID NO: 40), wherein X is a threonine (T) residue or a serine (S) residue, (b) the amino acid sequence of GKHMGKRCIITKXLXSGLLAVVGPYE (SEQ ID NO: 41), wherein X is an isoleucine (I) residue, a valine (V) residue, an asparagine (N) residue, or a threonine (T) residue, (c) the amino acid sequence of SGLLAVVGPYEXNGVPLKRV (SEQ ID NO: 42), wherein X is a valine (V) residue or an isoleucine (I) residue.

[0035] When the composition comprises an isolated polypeptide comprising the amino acid sequence of GKVAIILXGKHMGKRCIITK (SEQ ID NO: 40), X can be any suitable amino acid residue, but preferably is a threonine (T) residue or a serine (S) residue. In this respect, the isolated polypeptide can comprise, for example, the amino acid sequence of GKVAIILTGKHMGKRCIITK (SEQ ID NO: 43) or GKVAIILSGKHMGKRCIITK (SEQ ID NO: 44). When the composition comprises an isolated polypeptide comprising the amino acid sequence of GKHMGKRCIITKXLXSGLLAVVGPYE (SEQ ID NO: 41), X can be any suitable amino acid residue, but preferably is an isoleucine (I) residue, a valine (V) residue, an asparagine (N) residue, or a threonine (T) residue. In this respect, the isolated polypeptide can comprise, for example, the amino acid sequence of GKHMGKRCIITKILNSGLLAVVGPYE (SEQ ID NO: 45) or GKHMGKRCIITKVLTSGLLAVVGPYE (SEQ ID NO: 46). When the composition comprises an isolated polypeptide comprising the amino acid sequence of SGLLAVVGPYEXNGVPLKRV (SEQ ID NO: 42), X can be any suitable amino acid residue, but preferably is a valine (V) residue or an isoleucine (I) residue. In this respect, the isolated polypeptide can comprise, for example, the amino acid sequence of SGLLAVVGPYEVNGVPLKRV (SEQ ID NO: 47) or SGLLAVVGPYEINGVPLKRV (SEQ ID NO: 48).

[0036] The composition can comprise one, two, or all three of the aforementioned polypeptides alone or in any combination. In this respect, the composition can comprise any combination of any two of the aforementioned sequences, or all three of the aforementioned sequences. In a preferred embodiment, the composition comprises an isolated polypeptide comprising the amino acid sequence of SEQ ID NO: 49, SEQ ID NO: 50, or SEQ ID NO: 51.

[0037] In another embodiment, the composition comprises a pharmaceutically acceptable carrier and one or more isolated polypeptides, wherein each of the one or more isolated polypeptides comprises (a) an amino acid sequence comprising at least 20 contiguous amino acid residues of the sequence LEKKMQLKKEGKLLSAKAKEEKKK (SEQ ID NO: 55), (b) an amino acid sequence comprising at least 21 contiguous amino acid residues of the sequence IVCILGHVDTGKTKLLDKLRHTNVQDNEAGGITQQIGATFFPKD (SEQ ID NO: 56), (c) an amino acid sequence comprising at least 21 contiguous amino acid residues of the sequence the amino acid sequence of SKGIMIIDTPGHESFYNLRKRGSSLCDIAILVIDLMHGLEQQTKESIQILKQRNCPFVIA LNKIDRLYMW (SEQ ID NO: 57), (d) an amino acid sequence comprising at least 20 contiguous amino acid residues of the sequence KLECTVLEVKNIEGLGTTIDVILTNG (SEQ ID NO: 58), (e) the amino acid sequence of GVGLYVMASTLGSLEALLIFL (SEQ ID NO: 59), and (f) an amino acid sequence comprising at least 20 contiguous amino acid residues of the sequence MTDVSDVFNHVDKXGVGLYVMASTLGSLEALLIFL (SEQ ID NO: 60), wherein X is a serine (S) residue or a threonine (T) residue.

[0038] When the composition comprises an isolated polypeptide comprising at least 20 contiguous amino acid residues (e.g., 20, 21, 22, 23, or 24 contiguous amino acid residues) of SEQ ID NO: 55, the isolated polypeptide can comprise, for example, SEQ ID NO: 55. When the composition comprises an isolated polypeptide comprising an amino acid sequence comprising at least 21 contiguous amino acid residues (22, 23, 24 25, 26, 27, 28, 29, 30, 31, 32, 33, 34, 35, 36, 37, 38, 39, 40, 41, 42, 43, or 44 contiguous amino acid residues) of SEQ ID NO: 56, the isolated polypeptide can comprise, for example, SEQ ID NO: 56. When the composition comprises an isolated polypeptide comprising at least 21 contiguous amino acid residues (e.g., 21, 25, 30, 35, 40, 45, 50, 55, 60, 65, or 70 contiguous amino acid residues) of SEQ ID NO: 57, the isolated polypeptide can comprise, for example, SEQ ID NO: 57. When the composition comprises an isolated polypeptide comprising at least 20 contiguous amino acid residues (e.g., 20, 21, 22, 23, 24, 25, or 26 contiguous amino acid sequences) of SEQ ID NO: 58, the isolated polypeptide can comprise, for example, SEQ ID NO: 58. When the composition comprises an isolated polypeptide comprising at least 20 contiguous amino acid residues (e.g., 20, 21, 22, 23, 24 25, 26, 27, 28, 29, 30, 31, 32, 33, 34, or 35 contiguous amino acid residues) of SEQ ID NO: 60, X can be any suitable amino acid residue, but preferably is a serine (S) residue or a threonine (T) residue. In this respect, the isolated polypeptide can comprise, for example, an isolated polypeptide comprising at least 20 contiguous amino acid residues of the sequence MTDVSDVFNHVDKSGVGLYVMASTLGSLEALLIFL (SEQ ID NO: 61) or MTDVSDVFNHVDKTGVGLYVMASTLGSLEALLIFL (SEQ ID NO: 62). In particular, the isolated polypeptide can comprise, for example, the amino acid sequence of MTDVSDVFNHVDKSGVGLYVMASTLGSLEALLIFL (SEQ ID NO: 61) or MTDVSDVFNHVDKTGVGLYVMASTLGSLEALLIFL (SEQ ID NO: 62).

[0039] The composition can comprise one, two, three, four, five, or all six of the aforementioned polypeptides alone or in any combination. In this respect, the composition can comprise any combination of any two of the aforementioned sequences, any combination of any three of the aforementioned sequences, any combination of any four of the aforementioned sequences, any combination of any five of the aforementioned sequences, or all six of the aforementioned sequences. In a preferred embodiment, the composition comprises an isolated polypeptide comprising the amino acid sequence of SEQ ID NO: 63, SEQ ID NO: 64, or SEQ ID NO: 65.

[0040] In another embodiment, the composition comprises a pharmaceutically acceptable carrier and one or more isolated polypeptides, wherein each of the one or more isolated polypeptides comprises (a) the amino acid sequence of NLFFAKQVIPNACATQAILSI (SEQ ID NO: 69), and (b) the amino acid sequence of NFDSXMKGLTLSNCXFLRNIHN (SEQ ID NO: 70), wherein X is a serine (S) residue, a threonine (T) residue, or an asparagine (N) residue.

[0041] When the composition comprises the amino acid sequence of SEQ ID NO: 70, X can be any suitable amino acid residue, but preferably is a serine (S) residue, a threonine (T) residue, or an asparagine (N) residue. In this respect, the isolated polypeptide can comprise, for example, the amino acid sequence of NFDSTMKGLTLSNCNFLRNIHN (SEQ ID NO: 71), NFDSSMKGLTLSNCTFLRNIHN (SEQ ID NO: 72), or NFDSSMKGLTLSNCNFLRNIHN (SEQ ID NO: 73). The composition can comprise one or both of the aforementioned polypeptides. In a preferred embodiment, the composition comprises an isolated polypeptide comprising the amino acid sequence of SEQ ID NO: 74, SEQ ID NO: 75, or SEQ ID NO: 76.

[0042] In another embodiment, the composition comprises a pharmaceutically acceptable carrier and one or more isolated polypeptides, wherein each of the one or more isolated polypeptides comprises (a) the amino acid sequence of SGWKFEEQEGDVNMVLTKNVD (SEQ ID NO: 80), (b) an amino acid sequence comprising at least 20 contiguous amino acid residues of the sequence IIDFQLVSPFQAEGENEAQAEMTDFSVTVEKPN (SEQ ID NO: 81), (c) an amino acid sequence comprising at least 20 contiguous amino acid residues of the sequence GGITFYCTTLQNDEKFRYMIGNVKYYKNEEGKNSVS (SEQ ID NO: 82), and (d) an amino acid sequence comprising at least 21 contiguous amino acid residues of the sequence YNGPEFEDLDDSLQTSLDEWLANLGVDSELCDFIDSCSIDKEQREYM (SEQ ID NO: 83).

[0043] When the composition comprises an isolated polypeptide comprising at least 20 contiguous amino acid residues (e.g., 20, 21, 22, 23, 24 25, 26, 27, 28, 29, 30, 31, 32, or 33 contiguous amino acid residues) of SEQ ID NO: 81, the isolated polypeptide can comprise, for example, SEQ ID NO: 81. When the composition comprises an isolated polypeptide comprising at least 20 contiguous amino acid residues (e.g., 20, 21, 22, 23, 24 25, 26, 27, 28, 29, 30, 31, 32, 33, 34, 35 or 36 contiguous amino acid residues) of SEQ ID NO: 82, the isolated polypeptide can comprise, for example, SEQ ID NO: 82. When the composition comprises an isolated polypeptide comprising at least 21 contiguous amino acid residues of SEQ ID NO: 83, (e.g., 21, 22, 23, 24 25, 26, 27, 28, 29, 30, 31, 32, 33, 34, 35, 36, 37, 38, 39, 40, 41, 42, 43, 44, 45, 46, or 47 contiguous amino acid residues), the isolated polypeptide can comprise, for example, SEQ ID NO: 83.

[0044] The composition can comprise one, two, or all three of the aforementioned polypeptides alone or in any combination. In this respect, the composition can comprise any combination of any two of the aforementioned sequences, or all three of the aforementioned sequences. In a preferred embodiment, the composition comprises an isolated polypeptide comprising the amino acid sequence of SEQ ID NO: 84, SEQ ID NO: 85, or SEQ ID NO: 86.

[0045] In another embodiment, the composition comprises a pharmaceutically acceptable carrier and one or more isolated polypeptides, each of which comprises the amino acid sequence of SEQ ID NO: 90, SEQ ID NO: 91, SEQ ID NO: 92, SEQ ID NO: 93, or SEQ ID NO: 202. The invention also provides a composition comprising a pharmaceutically acceptable carrier and one or more isolated polypeptides, each of which comprises the amino acid sequence of SEQ ID NO: 98, SEQ ID NO: 99, or SEQ ID NO: 100.

[0046] In another embodiment, the composition comprises a pharmaceutically acceptable carrier and one or more isolated polypeptides, wherein each of the one or more isolated polypeptides comprises (a) the amino acid sequence of LLKHGWCEMLKGGVIMDVKX (SEQ ID NO: 104), wherein X is an asparagine (N) residue or a serine (S) residue, (b) an amino acid sequence comprising at least 20 contiguous amino acid residues of the sequence VEQAKIAEXAGAIGVMVLENIPSELR (SEQ ID NO: 105), wherein X is a lysine (K) residue or a glutamic acid (E) residue, (c) an amino acid sequence comprising at least 20 contiguous amino acid residues of the sequence SINVLAKVRIGHFVEAQILEELK (SEQ ID NO: 106), (d) an amino acid sequence comprising at least 27 contiguous amino acid residues of the sequence KHKFKTPFVCGCTNLGEALRRXSEGASMIRTKGEAGTGNII (SEQ ID NO: 107), wherein X is an isoleucine (I) residue or a methionine (M) residue, (e) an amino acid sequence comprising at least 20 contiguous amino acid residues of the sequence ATPADAAMCMQLGMDGVFVGSGIFESENP (SEQ ID NO: 108), or (f) an amino acid sequence comprising at least 20 contiguous amino acid residues of the sequence LPVVNFAAGGXATPADAAMCMQLGMDGVFVGSGIFESENP (SEQ ID NO: 109), wherein X is an isoleucine (I) residue or a valine (V) residue.

[0047] When the composition comprises an isolated polypeptide comprising the amino acid sequence of LLKHGWCEMLKGGVIMDVKX (SEQ ID NO: 104), X can be any suitable amino acid residue, but preferably is an asparagine (N) residue or a serine (S) residue. In this respect, the isolated polypeptide can comprise, for example, the amino acid sequence of LLKHGWCEMLKGGVIMDVKN (SEQ ID NO: 110), or LLKHGWCEMLKGGVIMDVKS (SEQ ID NO: 111). When the composition comprises an isolated polypeptide comprising at least 20 contiguous amino acid residues (e.g., 20, 21, 22, 23, 24, 25, or 26 contiguous amino acid residues) of SEQ ID NO: 105, X can be any suitable amino acid residue, but preferably is a lysine (K) residue or a glutamic acid (E) residue. In this respect, the isolated polypeptide can comprise, for example, at least 20 contiguous amino acid residues of the sequence VEQAKIAEKAGAIGVMVLENIPSELR (SEQ ID NO: 112), or VEQAKIAEEAGAIGVMVLENIPSELR (SEQ ID NO: 113). In particular, the isolated polypeptide can comprise, for example, the amino acid sequence of VEQAKIAEKAGAIGVMVLENIPSELR (SEQ ID NO: 112), or VEQAKIAEEAGAIGVMVLENIPSELR (SEQ ID NO: 113). When the composition comprises an isolated polypeptide comprising at least 20 contiguous amino acid residues (e.g., 20, 21, 22, or 23 contiguous amino acid residues) of SEQ ID NO: 106, the isolated polypeptide can comprise, for example, SEQ ID NO: 106. When the composition comprises an isolated polypeptide comprising at least 27 contiguous amino acid residues (e.g., 27, 28, 29, 30, 31, 32, 33, 34, 35, 36, 37, 38, 39, 40, or 41 contiguous amino acid residues) of SEQ ID NO: 107, X can be any suitable amino acid residue, but preferably is an isoleucine (I) residue or a methionine (M) residue. In this respect, the isolated polypeptide can comprise, for example, at least 27 contiguous amino acid residues of KHKFKTPFVCGCTNLGEALRRISEGASMIRTKGEAGTGNII (SEQ ID NO: 207), or KHKFKTPFVCGCTNLGEALRRMSEGASMIRTKGEAGTGNII (SEQ ID NO: 208). In particular, the isolated polypeptide can comprise, for example, the amino acid sequence of KHKFKTPFVCGCTNLGEALRRISEGASMIRTKGEAGTGNII (SEQ ID NO: 207), or KHKFKTPFVCGCTNLGEALRRMSEGASMIRTKGEAGTGNII (SEQ ID NO: 208). When the composition comprises an isolated polypeptide comprising at least 20 contiguous amino acid residues (e.g., 20, 21, 22, 23, 24, 25, 26, 27, 28, or 29 contiguous amino acid residues) of SEQ ID NO: 108, the isolated polypeptide can comprise, for example SEQ ID NO: 108. When the composition comprises an isolated polypeptide comprising least 20 contiguous amino acid residues (e.g., 20, 21, 22, 23, 24, 25, 26, 27, 28, 29, 30, 31, 32, 33, 34, 35, 36, 37, 38, 39, or 40 contiguous amino acid residues) of SEQ ID NO: 109, X can be any suitable amino acid residue, but preferably is an isoleucine (I) residue or a valine (V) residue. In this respect, the isolated polypeptide can comprise, for example, at least 20 contiguous amino acid residues of LPVVNFAAGGIATPADAAMCMQLGMDGVFVGSGIFESENP (SEQ ID NO: 114), or LPVVNFAAGGVATPADAAMCMQLGMDGVFVGSGIFESENP (SEQ ID NO: 115). In particular, the isolated polypeptide can comprise, for example, LPVVNFAAGGIATPADAAMCMQLGMDGVFVGSGIFESENP (SEQ ID NO: 114), or LPVVNFAAGGVATPADAAMCMQLGMDGVFVGSGIFESENP (SEQ ID NO: 115).

[0048] The composition can comprise one, two, three, four, five, or all six of the aforementioned polypeptides alone or in any combination. In this respect, the composition can comprise any combination of any two of the aforementioned sequences, any three of the aforementioned sequences, any four of the aforementioned sequences, any five of the aforementioned sequences, or all six of the aforementioned sequences. In a preferred embodiment, the composition comprises an isolated polypeptide comprising the amino acid sequence of SEQ ID NO: 116, SEQ ID NO: 117, SEQ ID NO: 118, or SEQ ID NO: 205.

[0049] The polypeptides of the inventive composition can be prepared by any method, such as by synthesizing the polypeptide or by expressing a nucleic acid encoding an appropriate amino acid sequence in a cell and harvesting the peptide from the cell or media containing the cell. A combination of such methods also can be used. Methods of de novo synthesizing polypeptides and methods of recombinantly producing polypeptides are known in the art (see, e.g., Chan et al., Fmoc Solid Phase Peptide Synthesis, Oxford University Press, Oxford, United Kingdom (2005); Reid, R. (ed.), Peptide and Protein Drug Analysis, Marcel Dekker, Inc. (2000); Westwood et al. (ed.), Epitope Mapping, Oxford University Press, Oxford, United Kingdom (2000); Sambrook et al., Molecular Cloning: A Laboratory Manual, 3^{rd} ed., Cold Spring Harbor Press, Cold Spring Harbor, N.Y. (2001); and Ausubel et al., Current Protocols in Molecular Biology, Greene Publishing Associates and John Wiley & Sons, New York (1994)).

[0050] In another embodiment of the invention, the composition can comprise a pharmaceutically acceptable carrier and one or more isolated nucleic acid sequences, each of which encodes any of the aforementioned isolated polypeptides. In this respect, the composition can comprise one or more isolated nucleic acid sequences, wherein each of the one or more nucleic acid sequences encodes a polypeptide comprising the amino acid sequence of any one of SEQ ID NO: 1-SEQ ID NO: 16, SEQ ID NO: 20-SEQ ID NO: 26, SEQ ID NO: 30-SEQ ID NO: 36, SEQ ID NO: 40-SEQ ID NO: 51, SEQ ID NO: 55-SEQ ID NO: 65, SEQ ID NO: 69-SEQ ID NO: 76, SEQ ID NO: 80-SEQ ID NO: 86, SEQ ID NO: 90-SEQ ID NO: 93, SEQ ID NO: 98-SEQ ID NO: 100, SEQ ID NO: 104-SEQ ID NO: 118, SEQ ID NO: 202, SEQ ID NO: 205, SEQ ID NO: 207-SEQ ID NO: 209, SEQ ID NO: 211, or SEQ ID NO: 212.

[0051] In one embodiment, the one or more isolated nucleic acid sequences comprise codons expressed more frequently (and preferably, most frequently) in humans than in Plasmodium. While the genetic code is generally universal across species, the choice among synonymous codons is often species-dependent. One of ordinary skill in the art would appreciate that, to achieve maximum protection against Plasmodium infection, high levels of Plasmodium antigens must be expressed in a mammalian, preferably a human, host. In this respect, the nucleic acid sequence preferably encodes the native amino acid sequence of a Plasmodium antigen, but comprises codons that are expressed more frequently in mammals (e.g., humans) than in Plasmodium. Changing native Plasmodium codons to the most frequently used in mammals will increase expression of the Plasmodium antigen in a mammal (e.g., a human). Such modified nucleic acid sequences are commonly described in the art as “humanized,” as “codon-optimized,” or as utilizing “mammalian-preferred” or “human-preferred” codons

[0052] In the context of the invention, a Plasmodium nucleic acid sequence is said to be “codon-optimized” if at least about 60% (e.g., at least about 70%, at least about 80%, or at least about 90%) of the wild-type codons in the nucleic acid sequence are encoded by mammalian-preferred codons. That is, a Plasmodium nucleic acid sequence is codon-optimized if at least about 60% of the codons in the nucleic acid sequence are mammalian-preferred codons.

[0053] Alternatively, the one or more isolated nucleic acid sequences can utilize particular codons at frequencies that best approximate codon usage frequencies of native Plasmodium species. Methods and algorithms have been developed in order to facilitate and adjust codon usage in this manner when expressing genes in heterologous systems, and these methods are referred to as “codon harmonization” (see, e.g., U.S. Patent Application Publication 2004/0209323; Angov et al., PLoS ONE, 3(5): e2189 (2008); and Angov et al., Methods Mol. Biol., 705: 1-13 (2011)). Adjusting codons of the isolated nucleic acid sequence so as to mimic the codon usage of a native Plasmodium gene may improve gene and/or protein expression by, for example, improving protein folding or protein solubility. Such modified nucleic acid sequences are commonly described in the art as “harmonized” or “codon-harmonized.”

[0054] Additionally and alternatively, the codon-optimized or codon-harmonized nucleic acid sequence encoding a Plasmodium antigen can be any sequence that hybridizes to an above-described sequence under at least moderate, preferably high, stringency conditions, such as described in, e.g., Sambrook et al., Molecular Cloning, a Laboratory Manual, 3rd edition, Cold Spring Harbor Press, Cold Spring Harbor, N.Y. (2001). Determining the degree of homology can be accomplished using any suitable method known in the art, such as those described herein.

[0055] In a preferred embodiment, the composition can comprise any one, or combination of, the following nucleic acid sequences: SEQ ID NO: 17, SEQ ID NO: 18, SEQ ID NO: 19, SEQ ID NO: 27, SEQ ID NO: 28, SEQ ID NO: 29, SEQ ID NO: 37, SEQ ID NO: 38, SEQ ID NO: 39, SEQ ID NO: 52, SEQ ID NO: 53, SEQ ID NO: 54, SEQ ID NO: 66, SEQ ID NO: 67, SEQ ID NO: 68, SEQ ID NO: 77, SEQ ID NO: 78, SEQ ID NO: 79, SEQ ID NO: 87, SEQ ID NO: 88, SEQ ID NO: 89, SEQ ID NO: 94, SEQ ID NO: 95, SEQ ID NO: 96, SEQ ID NO: 97, SEQ ID NO: 101, SEQ ID NO: 102, SEQ ID NO: 103, SEQ ID NO: 119, SEQ ID NO: 120, SEQ ID NO: 121, SEQ ID NO: 203, SEQ ID NO: 204, SEQ ID NO: 206, or SEQ ID NO: 210.

[0056] In one embodiment of the invention, the one or more isolated nucleic acid sequences which encode the Plasmodium antigens are present in a vector. Any vector can be employed in the context of the invention, including viral and non-viral vectors. Examples of suitable viral vectors include, but are not limited to, retroviral vectors, adeno-associated virus vectors, poxviral vectors (e.g., vaccinia virus vectors), herpesvirus vectors, parainfluenza-RSV chimeric vectors (PIV-RSV), adenoviral vectors, poliovirus, alphavirus, baculovirus, and Sindbis virus. Examples of suitable non-viral vectors include, but are not limited to, plasmids (e.g., DNA plasmids), yeast (e.g., Saccharomyces), liposomes, nanoparticles, and molecular conjugates (e.g., transferrin). When the vector is a plasmid (e.g., DNA plasmid), the plasmid can be administered with adjuvants, such as CpG or polymeric adjuvants. The vector also can be a virus-like particle (VLP) (see, e.g., Petry et al., Curr. Opin. Molecular Therapeutics, 5(5): 524-528 (2003); and U.S. Pat. No. 5,298,244).

[0057] In a preferred embodiment, the vector is an adenoviral vector. The term “adenoviral vector,” as used herein, refers to an adenovirus in which the adenoviral genome has been manipulated to accommodate one or more nucleic acid sequences that are non-native with respect to the adenoviral genome. Typically, an adenoviral vector is generated by introducing one or more mutations (e.g., a deletion, insertion, or substitution) into the adenoviral genome of the adenovirus so as to accommodate the insertion of a non-native nucleic acid sequence, for example, for gene transfer, into the adenovirus.

[0058] Non-human adenovirus (e.g., ape, simian, avian, canine, ovine, or bovine adenoviruses) can be used to generate the adenoviral vector (i.e., as a source of the adenoviral genome for the adenoviral vector). For example, the adenoviral vector can be based on a simian adenovirus, including both new world and old world monkeys (see, e.g., Virus Taxonomy: VIIIth Report of the International Committee on Taxonomy of Viruses (2005)). A phylogeny analysis of adenoviruses that infect primates is disclosed in, e.g., Roy et al., PLoS Pathog., 5(7): e100050. doi:10.1371/journal.ppat.1000503 (2009). For instance, a simian adenovirus can be of genotype 1, 3, 6, 7, 11, 16, 18, 19, 20, 27, 33, 38, 39, 48, 49, or 50, or any other simian adenoviral genotype. Other non-human adenoviruses which can be used in the invention include non-human primate adenoviruses that are genetically and/or phenotypically similar to or distinct from group C human adenoviruses.

[0059] A gorilla adenovirus can be used as the source of the adenoviral genome for the adenoviral vector. There are four widely recognized gorilla subspecies within the two species of Eastern Gorilla (Gorilla beringei) and Western Gorilla (Gorilla gorilla). The Western Gorilla species includes the subspecies Western Lowland Gorilla (Gorilla gorilla gorilla) and Cross River Gorilla (Gorilla gorilla diehli). The Eastern Gorilla species includes the subspecies Mountain Gorilla (Gorilla beringei beringei) and Eastern Lowland Gorilla (Gorilla beringei graueri) (see, e.g., Wilson and Reeder, eds., Mammalian Species of the World, 3rd ed., Johns Hopkins University Press, Baltimore, Md. (2005)). The adenoviral vector can be based on an adenovirus isolated from any of the aforementioned subspecies. Preferably, the adenoviral vector is based on an adenovirus isolated from Mountain Gorilla (Gorilla beringei beringei) or Eastern Lowland Gorilla (Gorilla beringei graueri). Gorilla adenoviruses and adenoviral vectors are described in, e.g., International Patent Application Nos. PCT/US2012/058956, PCT/US2012/058978, and PCT/US2012/059006.

[0060] A human adenovirus can be used as the source of the adenoviral genome for the adenoviral vector. For instance, an adenovirus can be of subgroup A (e.g., serotypes 12, 18, and 31), subgroup B (e.g., serotypes 3, 7, 11, 14, 16, 21, 34, 35, and 50), subgroup C (e.g., serotypes 1, 2, 5, and 6), subgroup D (e.g., serotypes 8, 9, 10, 13, 15, 17, 19, 20, 22-30, 32, 33, 36-39, and 42-48), subgroup E (e.g., serotype 4), subgroup F (e.g., serotypes 40 and 41), an unclassified serogroup (e.g., serotypes 49 and 51), or any other adenoviral serogroup or serotype. Adenoviral serotypes 1 through 51 (i.e., Ad1 through Ad51) are available from the American Type Culture Collection (ATCC, Manassas, Va.). Non-group C adenoviral vectors, methods of producing non-group C adenoviral vectors, and methods of using non-group C adenoviral vectors are disclosed in, for example, U.S. Pat. Nos. 5,801,030, 5,837,511, and 5,849,561, and International Patent Application Publications WO 1997/012986 and WO 1998/053087.

[0061] The adenoviral vector can comprise a combination of subtypes and thereby be a “chimeric” adenoviral vector. A chimeric adenoviral vector can comprise an adenoviral genome that is derived from two or more (e.g., 2, 3, 4, etc.) different adenovirus serotypes. In the context of the invention, a chimeric adenoviral vector can comprise approximately different or equal amounts of the genome of each of the two or more different adenovirus serotypes. For example, when the chimeric adenoviral vector genome is comprised of the genomes of two different adenovirus serotypes, the chimeric adenoviral vector genome preferably comprises no more than about 99.9% (e.g., no more than about 99%, no more than about 98%, no more than about 95%, no more than about 85%, no more than about 80%, no more than about 75%, no more than about 60%, no more than about 65%, or no more than about 50%) of the genome of one of the adenovirus serotypes, with the remainder of the chimeric adenovirus genome being derived from the genome of the other adenovirus serotype.

[0062] The adenoviral vector can be replication-competent, conditionally replication-competent, or replication-deficient.

[0063] A replication-competent adenoviral vector can replicate in typical host cells, i.e., cells typically capable of being infected by an adenovirus. A replication-competent adenoviral vector can have one or more mutations as compared to a wild-type adenovirus (e.g., one or more deletions, insertions, and/or substitutions) in the adenoviral genome that do not inhibit viral replication in host cells. For example, the adenoviral vector can have a partial or entire deletion of the adenoviral early region known as the E3 region, which is not essential for propagation of the adenoviral vector genome.

[0064] A conditionally-replicating adenoviral vector is an adenoviral vector that has been engineered to replicate under pre-determined conditions. For example, replication-essential gene functions, e.g., gene functions encoded by the adenoviral early regions, can be operably linked to an inducible, repressible, or tissue-specific transcription control sequence, e.g., a promoter. In such an embodiment, replication requires the presence or absence of specific factors that interact with the transcription control sequence. Conditionally-replicating adenoviral vectors are further described in U.S. Pat. No. 5,998,205.

[0065] A replication-deficient adenoviral vector is an adenoviral vector that requires complementation of one or more gene functions or regions of the adenoviral genome that are required for replication, as a result of, for example, a deficiency in one or more replication-essential gene function or regions, such that the adenoviral vector does not replicate in typical host cells, especially those in a human to be infected by the adenoviral vector.

[0066] A deficiency in a gene function or genomic region, as used herein, is defined as a disruption (e.g., deletion) of sufficient genetic material of the adenoviral genome to obliterate or impair the function of the gene (e.g., such that the function of the gene product is reduced by at least about 2-fold, 5-fold, 10-fold, 20-fold, 30-fold, or 50-fold) whose nucleic acid sequence was disrupted (e.g., deleted) in whole or in part. Deletion of an entire gene region often is not required for disruption of a replication-essential gene function. However, for the purpose of providing sufficient space in the adenoviral genome for one or more transgenes, removal of a majority of one or more gene regions may be desirable. While deletion of genetic material is preferred, mutation of genetic material by addition or substitution also is appropriate for disrupting gene function. Replication-essential gene functions are those gene functions that are required for adenovirus replication (e.g., propagation) and are encoded by, for example, the adenoviral early regions (e.g., the E1, E2, and E4 regions), late regions (e.g., the L1, L2, L3, L4, and L5 regions), genes involved in viral packaging (e.g., the IVa2 gene), and virus-associated RNAs (e.g., VA-RNA-1 and/or VA-RNA-2).

[0067] Whether the adenoviral vector is replication-competent or replication-deficient, the adenoviral vector retains at least a portion of the adenoviral genome. The adenoviral vector can comprise any portion of the adenoviral genome, including protein coding and non-protein coding regions. Desirably, the adenoviral vector comprises at least one nucleic acid sequence that encodes an adenovirus protein. The adenoviral vector can comprise a nucleic acid sequence that encodes any suitable adenovirus protein, such as, for example, a protein encoded by any one of the early region genes (i.e., E1A, E1B, E2A, E2B, E3, and/or E4 regions), or a protein encoded by any one of the late region genes, which encode the virus structural proteins (i.e., L1, L2, L3, L4, and L5 regions).

[0068] Preferably, the adenoviral vector is replication-deficient, such that the replication-deficient adenoviral vector requires complementation of at least one replication-essential gene function of one or more regions of the adenoviral genome for propagation (e.g., to form adenoviral vector particles).

[0069] The replication-deficient adenoviral vector can be modified in any suitable manner to cause the deficiencies in the one or more replication-essential gene functions in one or more regions of the adenoviral genome for propagation. The complementation of the deficiencies in the one or more replication-essential gene functions of one or more regions of the adenoviral genome refers to the use of exogenous means to provide the deficient replication-essential gene functions. Such complementation can be effected in any suitable manner, for example, by using complementing cells and/or exogenous DNA (e.g., helper adenovirus) encoding the disrupted replication-essential gene functions.

[0070] The adenoviral vector can be deficient in one or more replication-essential gene functions of only the early regions (i.e., E1-E4 regions) of the adenoviral genome, only the late regions (i.e., L1-L5 regions) of the adenoviral genome, both the early and late regions of the adenoviral genome, or all adenoviral genes (i.e., a high capacity adenovector (HC-Ad)). See Morsy et al., Proc. Natl. Acad. Sci. USA, 95: 965-976 (1998); Chen et al., Proc. Natl. Acad. Sci. USA, 94: 1645-1650 (1997); and Kochanek et al., Hum. Gene Ther., 10: 2451-2459 (1999). Examples of replication-deficient adenoviral vectors are disclosed in U.S. Pat. Nos. 5,837,511; 5,851,806; 5,994,106; 6,127,175; 6,482,616; and 7,195,896, and International Patent Application Publications WO 1994/028152, WO 1995/002697, WO 1995/016772, WO 1995/034671, WO 1996/022378, WO 1997/012986, WO 1997/021826, and WO 2003/022311.

[0071] The early regions of the adenoviral genome include the E1, E2, E3, and E4 regions. The E1 region comprises the E1A and E1B subregions, and one or more deficiencies in replication-essential gene functions in the E1 region can include one or more deficiencies in replication-essential gene functions in either or both of the E1A and E1B subregions, thereby requiring complementation of the E1A subregion and/or the E1B subregion of the adenoviral genome for the adenoviral vector to propagate (e.g., to form adenoviral vector particles). The E2 region comprises the E2A and E2B subregions, and one or more deficiencies in replication-essential gene functions in the E2 region can include one or more deficiencies in replication-essential gene functions in either or both of the E2A and E2B subregions, thereby requiring complementation of the E2A subregion and/or the E2B subregion of the adenoviral genome for the adenoviral vector to propagate (e.g., to form adenoviral vector particles).

[0072] The E3 region does not include any replication-essential gene functions, such that a deletion of the E3 region in part or in whole does not require complementation of any gene functions in the E3 region for the adenoviral vector to propagate (e.g., to form adenoviral vector particles). In the context of the invention, the E3 region is defined as the region that initiates with the open reading frame that encodes a protein with high homology to the 12.5K protein from the E3 region of human adenovirus 5 (NCBI reference sequence AP_{—}000218) and ends with the open reading frame that encodes a protein with high homology to the 14.7K protein from the E3 region of human adenovirus 5 (NCBI reference sequence AP_{—}000224.1). The E3 region may be deleted in whole or in part, or retained in whole or in part. The size of the deletion may be tailored so as to retain an adenoviral vector whose genome closely matches the optimum genome packaging size. A larger deletion will accommodate the insertion of larger heterologous nucleic acid sequences in the adenoviral genome. In one embodiment of the invention, the L4 polyadenylation signal sequences, which reside in the E3 region, are retained.

[0073] The E4 region comprises multiple open reading frames (ORFs). An adenoviral vector with a deletion of all of the open reading frames of the E4 region except ORF6, and in some cases ORF3, does not require complementation of any gene functions in the E4 region for the adenoviral vector to propagate (e.g., to form adenoviral vector particles). Conversely, an adenoviral vector with a disruption or deletion of ORF6, and in some cases ORF3, of the E4 region (e.g., with a deficiency in a replication-essential gene function based in ORF6 and/or ORF3 of the E4 region), with or without a disruption or deletion of any of the other open reading frames of the E4 region or the native E4 promoter, polyadenylation sequence, and/or the right-side inverted terminal repeat (ITR), requires complementation of the E4 region (specifically, of ORF6 and/or ORF3 of the E4 region) for the adenoviral vector to propagate (e.g., to form adenoviral vector particles). The late regions of the adenoviral genome include the L1, L2, L3, L4, and L5 regions. The adenoviral vector also can have a mutation in the major late promoter (MLP), as discussed in International Patent Application Publication WO 2000/000628, which can render the adenoviral vector replication-deficient if desired.

[0074] The one or more regions of the adenoviral genome that contain one or more deficiencies in replication-essential gene functions desirably are one or more early regions of the adenoviral genome, i.e., the E1, E2, and/or E4 regions, optionally with the deletion in part or in whole of the E3 region.

[0075] The replication-deficient adenoviral vector also can have one or more mutations as compared to a wild-type adenovirus (e.g., one or more deletions, insertions, and/or substitutions) in the adenoviral genome that do not inhibit viral replication in host cells. Thus, in addition to one or more deficiencies in replication-essential gene functions, the adenoviral vector can be deficient in other respects that are not replication-essential. For example, the adenoviral vector can have a partial or entire deletion of the adenoviral early region known as the E3 region, which, as discussed herein, is not essential for propagation of the adenoviral genome.

[0076] In one embodiment, the adenoviral vector is replication-deficient and requires, at most, complementation of the E1 region or the E4 region of the adenoviral genome, for propagation (e.g., to form adenoviral vector particles). Thus, the replication-deficient adenoviral vector requires complementation of at least one replication-essential gene function of the E1A subregion and/or the E1B region of the adenoviral genome (denoted an E1-deficient adenoviral vector) or the E4 region of the adenoviral genome (denoted an E4-deficient adenoviral vector) for propagation (e.g., to form adenoviral vector particles). The adenoviral vector can be deficient in at least one replication-essential gene function (desirably all replication-essential gene functions) of the E1 region of the adenoviral genome and at least one gene function of the nonessential E3 region of the adenoviral genome (denoted an E1/E3-deficient adenoviral vector). The adenoviral vector can be deficient in at least one replication-essential gene function (desirably all replication-essential gene functions) of the E4 region of the adenoviral genome and at least one gene function of the nonessential E3 region of the adenoviral genome (denoted an E3/E4-deficient adenoviral vector).

[0077] In one embodiment, the adenoviral vector is replication-deficient and requires, at most, complementation of the E2 region, preferably the E2A subregion, of the adenoviral genome, for propagation (e.g., to form adenoviral vector particles). Thus, the replication-deficient adenoviral vector requires complementation of at least one replication-essential gene function of the E2A subregion of the adenoviral genome (denoted an E2A-deficient adenoviral vector) for propagation (e.g., to form adenoviral vector particles). The adenoviral vector can be deficient in at least one replication-essential gene function (desirably all replication-essential gene functions) of the E2A region of the adenoviral genome and at least one gene function of the nonessential E3 region of the adenoviral genome (denoted an E2A/E3-deficient adenoviral vector).

[0078] In one embodiment, the adenoviral vector is replication-deficient and requires, at most, complementation of the E1 and E4 regions of the adenoviral genome for propagation (e.g., to form adenoviral vector particles). Thus, the replication-deficient adenoviral vector requires complementation of at least one replication-essential gene function of both the E1 and E4 regions of the adenoviral genome (denoted an E1/E4-deficient adenoviral vector) for propagation (e.g., to form adenoviral vector particles). The adenoviral vector can be deficient in at least one replication-essential gene function (desirably all replication-essential gene functions) of the E1 region of the adenoviral genome, at least one replication-essential gene function of the E4 region of the adenoviral genome, and at least one gene function of the nonessential E3 region of the adenoviral genome (denoted an E1/E3/E4-deficient adenoviral vector). The adenoviral vector preferably requires, at most, complementation of the E1 region of the adenoviral genome for propagation, and does not require complementation of any other deficiency of the adenoviral genome for propagation. More preferably, the adenoviral vector requires, at most, complementation of the E1 and E4 regions of the adenoviral genome for propagation, and does not require complementation of any other deficiency of the adenoviral genome for propagation.

[0079] The adenoviral vector, when deficient in multiple replication-essential gene functions of the adenoviral genome (e.g., an E1/E4-deficient adenoviral vector), can include a spacer sequence to provide viral growth in a complementing cell line similar to that achieved by adenoviruses or adenoviral vectors deficient in a single replication-essential gene function (e.g., an E1-deficient adenoviral vector). The spacer sequence can contain any nucleotide sequence or sequences which are of a desired length, such as sequences at least about 15 base pairs (e.g., between about 15 nucleotides and about 12,000 nucleotides), preferably about 100 nucleotides to about 10,000 nucleotides, more preferably about 500 nucleotides to about 8,000 nucleotides, even more preferably about 1,500 nucleotides to about 6,000 nucleotides, and most preferably about 2,000 to about 3,000 nucleotides in length, or a range defined by any two of the foregoing values. The spacer sequence can be coding or non-coding and native or non-native with respect to the adenoviral genome, but does not restore the replication-essential function to the deficient region. The spacer also can contain an expression cassette. More preferably, the spacer comprises a polyadenylation sequence and/or a gene that is non-native with respect to the adenoviral vector. The use of a spacer in an adenoviral vector is further described in, for example, U.S. Pat. No. 5,851,806 and International Patent Application Publication WO 1997/021826.

[0080] By removing all or part of the adenoviral genome, for example, the E1, E3, and E4 regions of the adenoviral genome, the resulting adenoviral vector is able to accept inserts of exogenous nucleic acid sequences while retaining the ability to be packaged into adenoviral capsids. An exogenous nucleic acid sequence can be inserted at any position in the adenoviral genome so long as insertion in the position allows for the formation of the adenoviral vector particle. The exogenous nucleic acid sequence (i.e., a nucleic acid sequence encoding a Plasmodium antigen) preferably is positioned in the E1 region, the E3 region, or the E4 region of the adenoviral genome.

[0081] The replication-deficient adenoviral vector of the invention can be produced in complementing cell lines that provide gene functions not present in the replication-deficient adenoviral vector, but required for viral propagation, at appropriate levels in order to generate high titers of viral vector stock. Such complementing cell lines are known and include, but are not limited to, 293 cells (described in, e.g., Graham et al., J. Gen. Virol., 36: 59-72 (1977)), PER.C6 cells (described in, e.g., International Patent Application Publication WO 1997/000326, and U.S. Pat. Nos. 5,994,128 and 6,033,908), and 293-ORF6 cells (described in, e.g., International Patent Application Publication WO 1995/034671 and Brough et al., J Virol., 71: 9206-9213 (1997)). Other suitable complementing cell lines to produce the replication-deficient adenoviral vector of the invention include complementing cells that have been generated to propagate adenoviral vectors encoding transgenes whose expression inhibits viral growth in host cells (see, e.g., U.S. Patent Application Publication 2008/0233650). Additional suitable complementing cells are described in, for example, U.S. Pat. Nos. 6,677,156 and 6,682,929, and International Patent Application Publication WO 2003/020879. In some instances, the cellular genome need not comprise nucleic acid sequences, the gene products of which complement for all of the deficiencies of a replication-deficient adenoviral vector. One or more replication-essential gene functions lacking in a replication-deficient adenoviral vector can be supplied by a helper virus, e.g., an adenoviral vector that supplies in trans one or more essential gene functions required for replication of the replication-deficient adenoviral vector. Alternatively, the adenoviral vector can comprise a non-native replication-essential gene that complements for the one or more replication-essential gene functions lacking in the inventive replication-deficient adenoviral vector. For example, an E1/E4-deficient adenoviral vector can be engineered to contain a nucleic acid sequence encoding E4 ORF6 that is obtained or derived from a different adenovirus (e.g., an adenovirus of a different serotype than the inventive adenoviral vector, or an adenovirus of a different species than the inventive adenoviral vector).

[0082] In addition to the one or more nucleic acid sequences encoding Plasmodium antigens, the adenoviral vector preferably comprises expression control sequences, such as promoters, enhancers, polyadenylation signals, transcription terminators, internal ribosome entry sites (IRES), and the like, that provide for the expression of the nucleic acid sequence in a host cell. Exemplary expression control sequences are known in the art and are described in, for example, Goeddel, Gene Expression Technology: Methods in Enzymology, Vol. 185, Academic Press, San Diego, Calif. (1990). Ideally, the Plasmodium antigen-encoding nucleic acid sequence is operably linked to a promoter and a polyadenylation sequence. The promoter desirably is a constitutive or inducible promoter, preferably a constitutive promoter. A large number of promoters, including constitutive, inducible, and repressible promoters, from a variety of different sources are well known in the art. Representative sources of promoters include for example, virus, mammal, insect, plant, yeast, and bacteria, and suitable promoters from these sources are readily available, or can be made synthetically, based on sequences publicly available, for example, from depositories such as the ATCC as well as other commercial or individual sources. Promoters can be unidirectional (i.e., initiate transcription in one direction) or bi-directional (i.e., initiate transcription in either a 3′ or 5′ direction). Non-limiting examples of promoters include, for example, the T7 bacterial expression system, pBAD (araA) bacterial expression system, the cytomegalovirus (CMV) promoter (human or mouse), the β-actin promoter (human or chicken), the EF1-α promoter, the ubiquitin promoter, the SV40 promoter, and the Rous Sarcoma Virus promoter. Inducible promoters include, for example, the Tet system (U.S. Pat. Nos. 5,464,758 and 5,814,618), the Ecdysone inducible system (No et al., Proc. Natl. Acad. Sci., 93: 3346-3351 (1996)), the T-REx™ system (Invitrogen, Carlsbad, Calif.), LACSWITCH™ system (Stratagene, San Diego, Calif.), and the Cre-ERT tamoxifen inducible recombinase system (Indra et al., Nuc. Acid. Res., 27: 4324-4327 (1999); Nuc. Acid. Res., 28: e99 (2000); U.S. Pat. No. 7,112,715; and Kramer & Fussenegger, Methods Mol. Biol., 308: 123-144 (2005)).

[0083] A promoter can be selected by matching its particular pattern of activity with the desired pattern and level of expression of an antigen(s). For example, the adenoviral vector can comprise two or more nucleic acid sequences that encode the same or different antigens and are operably linked to different promoters displaying distinct expression profiles. In this regard, a first promoter can be selected to mediate an initial peak of antigen production, thereby priming the immune system against an encoded antigen. A second promoter can be selected to drive production of the same or different antigen such that expression peaks several days after that of the first promoter, thereby “boosting” the immune system against the antigen. Alternatively, a hybrid promoter can be constructed which combines the desirable aspects of multiple promoters. For example, a CMV-Rous Sarcoma Virus hybrid promoter combining the CMV promoter's initial rush of activity with the Rous Sarcoma Virus promoter's high maintenance level of activity can be employed. In that antigens can be toxic to eukaryotic cells, it may be advantageous to modify the promoter to decrease activity in complementing cell lines used to propagate the adenoviral vector.

[0084] To optimize protein production, preferably the Plasmodium antigen-encoding nucleic acid sequence further comprises a polyadenylation site following the coding sequence. Any suitable polyadenylation sequence can be used, including a synthetic optimized sequence, as well as the polyadenylation sequence of BGH (Bovine Growth Hormone), polyoma virus, TK (Thymidine Kinase), EBV (Epstein Barr Virus), mouse globin D protein, and the papillomaviruses, including human papillomaviruses and BPV (Bovine Papilloma Virus). A preferred polyadenylation sequence is the SV40 (Simian Virus-40) polyadenylation sequence. Also, preferably all the proper transcription signals (and translation signals, where appropriate) are correctly arranged such that the nucleic acid sequence is properly expressed in the cells into which it is introduced. If desired, the nucleic acid sequence also can incorporate splice sites (i.e., splice acceptor and splice donor sites) to facilitate mRNA production.

[0085] If the nucleic acid sequence encodes a processed or secreted protein or peptide, or a protein that acts intracellularly, preferably the nucleic acid sequence further comprises the appropriate sequences for processing, secretion, intracellular localization, and the like. The nucleic acid sequence can be operably linked to a signal sequence, which targets a protein to cellular machinery for secretion. Appropriate signal sequences include, but are not limited to, leader sequences for immunoglobulin heavy chains and cytokines (see, for example, Ladunga et al., Current Opinions in Biotechnology, 11: 13-18 (2000)). Other protein modifications can be required to secrete a protein from a host cell, which can be determined using routine laboratory techniques. Preparing expression constructs encoding antigens and signal sequences is further described in, for example, U.S. Pat. No. 6,500,641. Methods of secreting non-secretable proteins are further described in, for example, U.S. Pat. No. 6,472,176, and International Patent Application Publication WO 2002/048377.

[0086] Plasmodium antigens encoded by the one or more nucleic acid sequences can be modified to attach or incorporate the antigen on a host cell surface. In this respect, the antigen can comprise a membrane anchor, such as a gpi-anchor, for conjugation onto a cell surface. A transmembrane domain can be fused to the antigen to incorporate a terminus of the antigen protein into the cell membrane. Other strategies for displaying peptides on a cell surface are known in the art and are appropriate for use in the context of the invention.

[0087] The composition is a physiologically acceptable (e.g., pharmaceutically acceptable) composition, which comprises a carrier, preferably a physiologically (e.g., pharmaceutically) acceptable carrier. Any suitable carrier can be used within the context of the invention, and such carriers are well known in the art. The choice of carrier will be determined, in part, by the particular use of the composition (e.g., administration to an animal) and the particular method used to administer the composition. The composition optionally can be sterile.

[0088] Suitable compositions include aqueous and non-aqueous isotonic sterile solutions, which can contain anti-oxidants, buffers, and bacteriostats, and aqueous and non-aqueous sterile suspensions that can include suspending agents, solubilizers, thickening agents, stabilizers, and preservatives. The composition can be presented in unit-dose or multi-dose sealed containers, such as ampules and vials, and can be stored in a freeze-dried (lyophilized) condition requiring only the addition of the sterile liquid carrier, for example, water, immediately prior to use. Extemporaneous solutions and suspensions can be prepared from sterile powders, granules, and tablets. Preferably, the carrier is a buffered saline solution. The composition can be generated in accordance with conventional techniques described in, e.g., Remington: The Science and Practice of Pharmacy, 21^{st} Edition, Lippincott Williams & Wilkins, Philadelphia, Pa. (2001).

[0089] When the composition comprises an adenoviral vector, the composition preferably is free of replication-competent adenovirus. In addition, the composition preferably is formulated to protect the adenoviral vector from damage prior to administration. For example, the composition can be formulated to reduce loss of the adenoviral vector on devices used to prepare, store, or administer the adenoviral vector, such as glassware, syringes, or needles. The composition can be formulated to decrease the light sensitivity and/or temperature sensitivity of the adenoviral vector. To this end, the composition preferably comprises a pharmaceutically acceptable liquid carrier, such as, for example, those described above, and a stabilizing agent selected from the group consisting of polysorbate 80, L-arginine, polyvinylpyrrolidone, trehalose, and combinations thereof. Use of such a composition will extend the shelf life of the adenoviral vector, and facilitate its administration. Formulations for adenoviral vector-containing compositions are further described in, for example, U.S. Pat. No. 6,225,289, U.S. Pat. No. 6,514,943, and International Patent Application Publication WO 2000/034444.

[0090] The composition also can be formulated to enhance transduction efficiency of the composition. In addition, one of ordinary skill in the art will appreciate that the isolated Plasmodium polypeptides and/or nucleic acid sequences can be present in a composition with other therapeutic or biologically-active agents. For example, factors that control inflammation, such as ibuprofen or steroids, can be part of the composition to reduce swelling and inflammation associated with in vivo administration of the composition. Antibiotics, i.e., microbicides and fungicides, can be present to treat existing infection and/or reduce the risk of future infection, such as infection associated with gene transfer procedures.

[0091] The invention further provides a method of inducing a protective immune response against a Plasmodium parasite in a mammal. The method comprises administering to the mammal the inventive composition comprising isolated Plasmodium polypeptides or nucleic acid sequences, whereupon a protective immune response against a Plasmodium parasite in the mammal is induced. When the composition comprises one or more Plasmodium nucleic acid sequences, the one or more nucleic acid sequences encoding the Plasmodium polypeptides are expressed in the mammal to produce the Plasmodium polypeptide. In accordance with the invention, the composition is administered to a mammal, most preferably a human. The human preferably is in a population that has a high risk of acquiring Plasmodium parasites. Such high-risk populations include residents of, and travelers to, parts of Africa, Asia, the Middle East, Central and South America, Hispaniola, and Oceania, as well as military personnel deployed to these areas.

[0092] The immune response can be directed against any Plasmodium species that infects a particular mammal, such as those described herein. Preferably, the mammal is a human and the immune response is directed against a human-infecting Plasmodium species. Most preferably, the immune response is directed against Plasmodium falciparum and/or Plasmodium vivax. The immune response can be a humoral immune response, a cell-mediated immune response, or, desirably, a combination of humoral and cell-mediated immunity. Ideally, the immune response provides protection to the animal, typically a mammal such as a human, upon subsequent challenge with Plasmodium. The inventive method also can be used for antibody production and harvesting.

[0093] To enhance the immune response generated against a Plasmodium antigen, the composition also can comprise an immune stimulator, or a nucleic acid sequence that encodes an immune stimulator. Immune stimulators also are referred to in the art as “adjuvants,” and include, for example, cytokines, chemokines, or chaperones. Cytokines include, for example, Macrophage Colony Stimulating Factor (e.g., GM-CSF), Interferon Alpha (IFN-α), Interferon Beta (IFN-β), Interferon Gamma (IFN-γ), interleukins (IL-1, IL-2, IL-4, IL-5, IL-6, IL-8, IL-10, IL-12, IL-13, IL-15, IL-16, and IL-18), the TNF family of proteins, Intercellular Adhesion Molecule-1 (ICAM-1), Lymphocyte Function-Associated antigen-3 (LFA-3), B7-1, B7-2, FMS-related tyrosine kinase 3 ligand, (Flt3L), vasoactive intestinal peptide (VIP), and CD40 ligand. Chemokines include, for example, B Cell-Attracting chemokine-1 (BCA-1), Fractalkine, Melanoma Growth Stimulatory Activity (MGSA) protein, Hemofiltrate CC chemokine 1 (HCC-1), Interleukin 8 (IL-8), Interferon-stimulated T-cell alpha chemoattractant (I-TAC), Lymphotactin, Monocyte Chemotactic Protein 1 (MCP-1), Monocyte Chemotactic Protein 3 (MCP-3), Monocyte Chemotactic Protein 4 (CP-4), Macrophage-Derived Chemokine (MDC), a macrophage inflammatory protein (MIP), Platelet Factor 4 (PF4), RANTES, BRAK, eotaxin, exodus 1-3, and the like. Chaperones include, for example, the heat shock proteins Hsp170, Hsc70, and Hsp40.

[0094] The composition ideally comprises a “therapeutically effective amount” of the isolated Plasmodium polypeptide or polypeptides. A “therapeutically effective amount” refers to an amount effective, at dosages and for periods of time necessary, to achieve a desired therapeutic result. The therapeutically effective amount may vary according to factors such as the disease state, age, sex, and weight of the individual, and the ability of the Plasmodium polypeptide to elicit a desired response in the individual. For example, a therapeutically effective amount of a Plasmodium polypeptide of the invention is an amount which ameliorates a malaria infection in a human.

[0095] Alternatively, the pharmacologic and/or physiologic effect may be prophylactic, i.e., the effect completely or partially prevents a disease or symptom thereof. In this respect, the inventive method comprises administering a “prophylactically effective amount” of the composition. A “prophylactically effective amount” refers to an amount effective, at dosages and for periods of time necessary, to achieve a desired prophylactic result (e.g., prevention of Plasmodium infection or onset of malaria). For example, a prophylactically effective amount of a Plasmodium polypeptide of the invention is an amount which protects a human upon subsequent challenge with Plasmodium.

[0096] In embodiments where the composition comprises an adenoviral vector comprising one or more nucleic acid sequences that encode a Plasmodium polypeptide, the composition comprises a “therapeutically effective amount” of the adenoviral vector, i.e., a dose of adenoviral vector which provokes a desired immune response in the mammal. Desirably, a single dose of adenoviral vector comprises about 1×10⁵ or more particles (which also are referred to as particle units (pu)) of the adenoviral vector, e.g., about 1×10⁶ or more particles, about 1×10⁷ or more particles, about 1×10⁸ or more particles, about 1×10⁹ or more particles, or about 3×10⁹ or more particles of the adenoviral vector. Alternatively, or in addition, a single dose of adenoviral vector comprises about 3×10¹⁴ particles or less of the adenoviral vector, e.g., about 1×10¹³ particles or less, about 1×10¹² particles or less, about 3×10¹¹ particles or less, about 1×10¹¹ particles or less, about 1×10¹⁰ particles or less, or about 1×10⁹ particles or less of the adenoviral vector. Thus, a single dose of adenoviral vector can comprise a quantity of particles of the adenoviral vector in a range defined by any two of the aforementioned values. For example, a single dose of adenoviral vector can comprise 1×10⁵-1×10¹⁴ particles, 1×10⁷-1×10¹² particles, 1×10⁸-1×10¹¹ particles, 3×10⁸-3×10¹¹ particles, 1×10⁹-1×10¹² particles, 1×10⁹-1×10¹¹ particles, 1×10⁹-1×10¹⁰ particles, or 1×10¹⁰-1×10¹² particles, of the adenoviral vector. In other words, a single dose of adenoviral vector can comprise, for example, about 1×10⁶ pu, 2×10⁶ pu, 4×10⁶ pu, 1×10⁷ pu, 2×10⁷ pu, 4×10⁷ pu, 1×10⁸ pu, 2×10⁸ pu, 3×10⁸ pu, 4×10⁸ pu, 1×10⁹ pu, 2×10⁹ pu, 3×10⁹ pu, 4×10⁹ pu, 1×10¹⁰ pu, 2×10¹⁰ pu, 3×10¹⁰ pu, 4×10¹⁰ pu, 1×10¹¹ pu, 2×10¹¹ pu, 3×10¹¹ pu, 4×10¹¹ pu, 1×10¹² pu, 2×10¹² pu, 3×10¹² pu, or 4×10¹² pu of the adenoviral vector.

[0097] Administration of the inventive composition can be one component of a multistep regimen for inducing a protective immune response against Plasmodium parasites (e.g., Plasmodium falciparum and/or Plasmodium vivax) in a mammal. In this respect, the method of inducing a protective immune response can further comprise administering to the mammal a boosting composition after administering the inventive composition to the mammal. In this embodiment, therefore, the immune response is “primed” upon administration of the inventive composition, and is “boosted” upon administration of the boosting composition. Alternatively, the inventive method further comprises administering to the mammal a priming composition to the mammal prior to administering the inventive composition to the mammal. In this embodiment, therefore, the immune response is “primed” upon administration of the priming composition, and is “boosted” upon administration of the inventive composition.

[0098] In one embodiment, the Plasmodium polypeptide(s) present in, or encoded by a vector present in, the priming composition and the boosting composition are desirably the same. For example, if the priming composition comprises a hypothetical Plasmodium “protein A,” then the boosting composition also comprises “protein A,” or comprises a vector which encodes “protein A.” At least one of the priming composition or the boosting composition desirably comprises an adenoviral vector that comprises a nucleic acid sequence encoding a Plasmodium antigen, while the other of the priming composition and the boosting composition can comprise the inventive composition or a different effective agent, though desirably a gene transfer vector that comprises a nucleic acid sequence encoding a Plasmodium antigen. Any gene transfer vector can be employed, including viral and non-viral gene transfer vectors. Examples of suitable viral gene transfer vectors include, but are not limited to, retroviral vectors, adeno-associated virus vectors, vaccinia virus vectors, herpesvirus vectors, parainfluenza-RSV chimeric vectors (PIV-RSV), and adenoviral vectors. Examples of suitable non-viral vectors include, but are not limited to, plasmids, liposomes, and molecular conjugates (e.g., transferrin). Preferably, the priming composition or the boosting composition comprises a plasmid or an adenoviral vector. Alternatively, an immune response can be primed or boosted by administration of a Plasmodium protein itself (e.g., any of the Plasmodium proteins described herein) with or without a suitable adjuvant (e.g., alum, QS-21, insulin-derived adjuvant, etc.), a live-attenuated Plasmodium parasite, and the like. When the priming composition or the boosting composition comprises an adenoviral vector, the adenoviral vector can be, or can be derived from, any adenovirus that infects a human or non-human animal, such as those described herein. In this respect, the priming composition or the boosting composition can comprise a human adenoviral vector (e.g., serotype 5, 28, or 35), a simian adenoviral vector (such as described in, e.g., International Patent Application Publication WO 2011/057254), or a gorilla adenoviral vector. For example, a priming composition containing a human serotype 5 adenoviral vector can be administered to a human, followed by administration of a boosting composition containing the inventive composition comprising one or more isolated Plasmodium polypeptides described herein (i.e., a “heterologous” prime-boost regimen). Alternatively, a priming composition containing the inventive composition comprising one or more isolated Plasmodium polypeptides described herein can be administered to a human, followed by administration of a boosting composition containing a human serotype 5 adenoviral vector. In another embodiment, the priming composition contains an adenoviral vector of a first serotype comprising a nucleic acid sequence encoding a Plasmodium antigen, and the boosting composition contains an adenoviral vector of a different serotype comprising a nucleic acid sequence encoding the same Plasmodium antigen as the first adenoviral vector. Alternatively, the priming composition can contain a plasmid that comprises a nucleic acid sequence encoding a Plasmodium antigen, and the boosting composition can contain the inventive composition comprising an adenoviral vector. In yet another embodiment, the inventive composition comprising one or more isolated Plasmodium polypeptides can be administered to a human, followed by a second administration of the same composition (i.e., a “homologous” prime-boost regimen). One of ordinary skill in the art will appreciate that any combination of vectors encoding one or more Plasmodium antigens and/or Plasmodium polypeptides themselves can be employed as the priming and/or boosting compositions in conjunction with the inventive composition described herein.

[0099] Administration of the priming composition and the boosting composition can be separated by any suitable timeframe (e.g., at least any of about 1 week, 2 weeks, 4 weeks, 8 weeks, 12 weeks, 16 weeks, 24 weeks, 52 weeks, 2 years, and 5 years, or any range defined by any two of the foregoing values). The boosting composition preferably is administered to a mammal (e.g., a human) at least about 2 weeks (e.g., at least any of about 3 weeks, 4 weeks, 5 weeks, 6 weeks, 7 weeks, 8 weeks, 9 weeks, 10 weeks, 11 weeks, 12 weeks, 13 weeks, 14 weeks, 15 weeks, 16 weeks, 20 weeks, 24 weeks, 28 weeks, 35 weeks, 40 weeks, 50 weeks, 52 weeks, 2 years, and 5 years, or any range defined by any two of the foregoing values) following administration of the priming composition. More than one dose of priming composition and/or boosting composition can be provided in any suitable timeframe. The dose of the priming composition and boosting composition administered to the mammal depends on a number of factors, including the extent of any side-effects, the particular route of administration, and the like.

[0100] The following examples further illustrate the invention but, of course, should not be construed as in any way limiting its scope.

### Example 1

[0101] This example demonstrates a method for screening and isolating Plasmodium antigen sequences that provide protection against malaria challenge.

[0102] Adenovirus-based microarray (“adeno-array”) technology (see, e.g., U.S. Patent Application Publication 2010/0222234) was used for high-throughput discovery of pre-erythrocytic Plasmodium falciparum antigens using orthologs identified in a P. yoelii (Py) mouse model. Specifically, bioinformatics data mining using publicly available genomic and proteomic databases was performed to identify highly expressed P. yoelii pre-erythrocytic antigens. Based on expression abundance data from microarray analysis and protein mass spectrometry analysis by several research groups, 300 sporozoite stage and liver stage candidate P. yoelii genes with identifiable P. falciparum orthologs were prioritized for generation of an adeno-array.

[0103] The candidate P. yoelii genes were cloned into a high-level adenovirus vector-based expression cassette using high-throughput methodologies (such as those described in, e.g., U.S. Patent Application Publication 2010/0222234) to produce an adeno-array. Specifically, PCR-amplified candidate antigens genes were first cloned into a pCR8/GW/Topo cloning vector (Life Technologies, Carlsbad, Calif.). The P. yoelii genes were then individually subcloned into a CMV expression cassette which resides in a plasmid containing the human adenovirus 5 genome in which the E1 and E3 regions were deleted. The CMV expression cassette resides in the E1 region of this plasmid. Cloning was carried out using the attR1-CmR-ccB-attR2 lambda recombination technology (Life Technologies, Carlsbad, Calif.). To construct the adenoviral vectors, the adenoviral genomes were liberated from the plasmid backbone and used to transfect 293-ORF6 complementing cells (Brough et al., J. Virol., 71: 9206-9213 (1997)).

[0104] A20/2J antigen presenting cells (APCs) were infected with adenoviral vectors expressing Py antigens from the adeno-array and used as targets in an IFNγ assay to recall T-cell responses from mice immunized with Plasmodium yoelii-irradiated sporozoites. The infected APCs were then incubated with splenocytes from mice immunized with known protective regimens of Radiation Attenuated Sporozoites (RAS), and antigen-specific CD8′ T cell responses were measured by Intercellular Cytokine Staining (ICS). Adenoviral vectors encoding the Py circumsporozoite protein (PyCSP) and lacking a transgene (AdNull) were used as controls. New antigens that recalled relatively frequent IFNγ responses in RAS-immunized, but not in naïve mice, were identified. The putative gene product encoded by each of the P. yoelii antigens and their corresponding amino acid SEQ ID NOs, as well as the SEQ ID NOs for the corresponding P. falciparum and P. vivax orthologs, are set forth in Table 1.

TABLE 1

| | P. yoelii | P. falciparum | P. vivax |
|---|---|---|---|
| | (17XNL) | (3D7) Ortholog | (SaI-1) Ortholog |
| | SEQ ID | SEQ ID | SEQ ID |
| Putative Gene Product | NO | NO | NO |
| putative WD-40 repeat | 122 | 149 | 176 |
| protein | | | |
| serine | 123 | 150 | 177 |
| hydroxymethyl- | | | |
| transferase, | | | |
| mitochondrial precursor | | | |
| 49 kDa zinc finger | 124 | 151 | 178 |
| protein | | | |
| hypothetical protein | 98 | 99 | 100 |
| 60S ribosomal protein | 49 | 50 | 51 |
| L6, putative | | | |
| Arabidopsis thaliana | 24 | 25 | 26 |
| At1g20220/T20H2_3- | | | |
| related | | | |
| translation elongation | 34 | 35 | 36 |
| factor EF-1, subunit | | | |
| alpha | | | |
| adenosine deaminase | 14 | 15 | 16 |
| translation initiation | 125 | 152 | 179 |
| factor eIF-5A | | | |
| stress-induced protein | 126 | 153 | 180 |
| sti1-like protein | | | |
| ethylene-inducible | 116 | 117 | 118 |
| protein hever | | | |
| DNA replication | 127 | 154 | 181 |
| licensing factor | | | |
| mis5 | | | |
| pyruvate dehydrogenase | 128 | 155 | 182 |
| E1 alpha subunit | | | |
| ribosomal protein | 129 | 156 | 183 |
| var1, putative | | | |
| asparagine-rich | 130 | 157 | 184 |
| protein, putative | | | |
| succinyl-coa ligase beta- | 131 | 158 | 185 |
| chain, hydrogenosomal | | | |
| precursor | | | |
| Drosophila melanogaster | 132 | 159 | 186 |
| RE21692p, putative | | | |
| cyclophilin | 133 | 160 | 187 |
| hypothetical protein | 134 | 161 | 188 |
| Protein of unknown | 135 | 162 | 189 |
| function, putative | | | |
| Homo sapiens RIKEN | 136 | 163 | 190 |
| cDNA 1600015H11 | | | |
| gene-related | | | |
| translation initiation | 63 | 64 | 65 |
| factor if-2 | | | |
| Leucine Rich Repeat, | 137 | 164 | 191 |
| putative | | | |
| hypothetical protein | 138 | 165 | 192 |
| DnaJ homolog, putative | 139 | 166 | 193 |
| ADP-ribosylation factor | 140 | 167 | 194 |
| GTPase-activating | | | |
| protein | | | |
| ubiquitin carboxyl- | 74 | 75 | 76 |
| terminal hydrolase | | | |
| isozyme 15 | | | |
| elongation factor 3 | 141 | 168 | 195 |
| related protein | | | |
| PFEF3-rl | | | |
| eukaryotic translation | 142 | 169 | 196 |
| initiation factor 3 | | | |
| 39 kDa subunit | | | |
| hypothetical protein | 90 | 91 | 93 |
| putative protein | 84 | 85 | 86 |
| Rab1 protein | 143 | 170 | 197 |
| peptidyl-prolyl cis-trans | 144 | 171 | 198 |
| isomerase, cyclophilin- | | | |
| type | | | |
| Ribosomal protein S7e | 145 | 172 | 199 |
| similar to RIKEN cDNA | 146 | 173 | 200 |
| 2010107D16 gene | | | |
| neurofilament protein H | 147 | 174 | 201 |
| form H2 | | | |
| 60S acidic ribosomal | 148 | 175 | |
| protein P2 | | | |
| putative protein | 213 | 214 | 215 |
| phosphatase 2C | | | |
| putative small nucleolar | 216 | 217 | 218 |
| ribonucleoprotein gar1 | | | |
| 26s protease regulatory | 219 | 220 | 221 |
| subunit 6a (tat-binding | | | |
| protein homolog 1) | | | |
| (tbp-1) | | | |
| Drosophila melanogaster | 222 | 223 | 224 |
| CG1349 gene product | | | |
| putative ribosomal | 225 | 226 | 227 |
| protein S19e | | | |
| glycyl-tRNA synthetase | 228 | 229 | 230 |
| transketolase | 231 | 232 | 233 |
| asparaginyl-tRNA | 234 | 235 | 236 |
| synthetase | | | |
| putative acyl carrier | 237 | 238 | 239 |
| protein | | | |
| putative calcyclin | 240 | 241 | 242 |
| binding protein | | | |
| putative glycerol kinase | 243 | 244 | 245 |
| elongation factor 2 | 246 | 247 | 248 |
| hexokinase | 249 | 250 | 251 |
| pyruvate dehydrogenase | 252 | 253 | 254 |
| E1 beta subunit | | | |
| U43539 hepatocyte | 255 | 256 | 257 |
| erythrocyte protein 17 | | | |
| kDa | | | |
| protein kinase domain | 258 | 259 | 260 |
| merozoite surface protein | 261 | 262 | 263 |
| 1 precursor | | | |
| merozoite surface protein | 264 | 265, 266, 267 | 268 |
| 7 precursor | | | |
| glutathione s-transferase | 269 | N/A | 270 |
| S-adenosylmethionine | 271 | 272 | 273 |
| synthetase | | | |

[0105] Antigens that recalled the most robust T cell responses were selected and their capacity to protect mice from a P. yoelii sporozoite challenge was tested. In this regard, 100 μg of plasmid vector expressing each of the above Py antigens were injected into mice at the start (Day 0) of the experiment, and 6 weeks later, animals were boosted by intramuscular (IM) injection of adenoviral vectors expressing the same antigens at 1×10¹⁰ particles per mouse. Immunized mice were challenged with 300 or 600 live sporozoites two weeks after boost. Tail vein bleeds were performed from 6 to 14 days after live sporozoite challenge and blood films were prepared for analysis of blood-stage parasitemia. Outbred CD1 mice were immunized with a DNA prime-adenovirus boost regimen and sterile protection was measured following sporozoite challenge as set forth in Table 2.

TABLE 2

| | | Sterile protection | |
|---|---|---|---|
| Antigen | SEQ ID NO | # Protected/# challenged | % protected |
| PyCSP | | 53/112 | 47% |
| GV0032 | 24 | 16/41 | 39% |
| GV0041 | 14 | 10/42 | 24% |
| GV0033 | 34 | 6/28 | 21% |
| GV0043 | 125 | 1/14 | 7% |
| GV0074 | 213 | 4/14 | 29% |
| GV0176 | 74 | 7/28 | 25% |
| GV0196 | 90 | 7/28 | 25% |
| GV0004 | 123 | 3/14 | 21% |
| GV0013 | 124 | 3/14 | 21% |
| GV0199 | 84 | 6/28 | 21% |
| GV0014 | 98 | 8/42 | 19% |
| GV0139 | 216 | 3/14 | 21% |
| GV0104 | 271 | 1/14 | 7% |
| Naïve control | | 11/112 | 10% |
| AdNull | | 8/112 | 7% |

[0106] The results of this example demonstrate the identification of new Plasmodium antigens that can induce a protective immune response against malaria in a mammal.

[0107] All references, including publications, patent applications, and patents, cited herein are hereby incorporated by reference to the same extent as if each reference were individually and specifically indicated to be incorporated by reference and were set forth in its entirety herein.

[0108] The use of the terms “a” and “an” and “the” and “at least one” and similar referents in the context of describing the invention (especially in the context of the following claims) are to be construed to cover both the singular and the plural, unless otherwise indicated herein or clearly contradicted by context. The use of the term “at least one” followed by a list of one or more items (for example, “at least one of A and B”) is to be construed to mean one item selected from the listed items (A or B) or any combination of two or more of the listed items (A and B), unless otherwise indicated herein or clearly contradicted by context. The terms “comprising,” “having,” “including,” and “containing” are to be construed as open-ended terms (i.e., meaning “including, but not limited to,”) unless otherwise noted. Recitation of ranges of values herein are merely intended to serve as a shorthand method of referring individually to each separate value falling within the range, unless otherwise indicated herein, and each separate value is incorporated into the specification as if it were individually recited herein. All methods described herein can be performed in any suitable order unless otherwise indicated herein or otherwise clearly contradicted by context. The use of any and all examples, or exemplary language (e.g., “such as”) provided herein, is intended merely to better illuminate the invention and does not pose a limitation on the scope of the invention unless otherwise claimed. No language in the specification should be construed as indicating any non-claimed element as essential to the practice of the invention.

[0109] Preferred embodiments of this invention are described herein, including the best mode known to the inventors for carrying out the invention. Variations of those preferred embodiments may become apparent to those of ordinary skill in the art upon reading the foregoing description. The inventors expect skilled artisans to employ such variations as appropriate, and the inventors intend for the invention to be practiced otherwise than as specifically described herein. Accordingly, this invention includes all modifications and equivalents of the subject matter recited in the claims appended hereto as permitted by applicable law. Moreover, any combination of the above-described elements in all possible variations thereof is encompassed by the invention unless otherwise indicated herein or otherwise clearly contradicted by context.

The application's sequence listing, which the Patent Office published only in electronic form, follows.

SEQUENCE LISTING (273 sequences)

SEQ ID NO: 1 - protein, 21 aa, Plasmodium yoelii
  MISC_FEATURE (6)..(6): X is a lysine (K) residue, a glutamic acid (E) residue, an arginine (R) residue, an isoleucine (I) residue, a leucine (L) residue, a cysteine (C) residue, or a valine (V) residue.
  MISC_FEATURE (9)..(9): X is a lysine (K) residue, a glutamic acid (E) residue, an arginine (R) residue, an isoleucine (I) residue, a leucine (L) residue, a cysteine (C) residue, or a valine (V) residue.
  MISC_FEATURE (11)..(11): X is a lysine (K) residue, a glutamic acid (E) residue, an arginine (R) residue, an isoleucine (I) residue, a leucine (L) residue, a cysteine (C) residue, or a valine (V) residue.
  MISC_FEATURE (14)..(14): X is a lysine (K) residue, a glutamic acid (E) residue, an arginine (R) residue, an isoleucine (I) residue, a leucine (L) residue, a cysteine (C) residue, or a valine (V) residue.
KKERYXIWXRXPKXELHCHLD

SEQ ID NO: 2 - protein, 15 aa, Plasmodium yoelii
KYKEGVVLMEFRYSP

SEQ ID NO: 3 - protein, 25 aa, Plasmodium yoelii
  MISC_FEATURE (6)..(6): X is a histidine (H) residue, a tryptophan (W) residue, a phenylalanine (F) residue, an isoleucine (I) residue, an asparagine (N) residue, or a glutamic acid (E) residue
  MISC_FEATURE (9)..(9): X is a histidine (H) residue, a tryptophan (W) residue, a phenylalanine (F) residue, an isoleucine (I) residue, an asparagine (N) residue, or a glutamic acid (E) residue
  MISC_FEATURE (10)..(10): X is a histidine (H) residue, a tryptophan (W) residue, a phenylalanine (F) residue, an isoleucine (I) residue, an asparagine (N) residue, or a glutamic acid (E) residue
EDLAKXAVXXKYKEGVVLMEFRYSP

SEQ ID NO: 4 - protein, 29 aa, Plasmodium yoelii
  MISC_FEATURE (10)..(10): X is a glutamine (Q) residue, a methionine (M) residue, or a lysine (K) residue
KSMDTHPIRXLYDAGVKVSVNSDDPGMFL

SEQ ID NO: 5 - protein, 21 aa, Plasmodium yoelii
KKERYEIWRRIPKVELHCHLD

SEQ ID NO: 6 - protein, 21 aa, Plasmodium falciparum
KKERYKIWKRLPKCELHCHLD

SEQ ID NO: 7 - protein, 21 aa, Plasmodium vivax
KKERYKIWKRIPKCELHCHLD

SEQ ID NO: 8 - protein, 25 aa, Plasmodium yoelii
EDLAKWAVIEKYKEGVVLMEFRYSP

SEQ ID NO: 9 - protein, 25 aa, Plasmodium falciparum
EDLAKHAVFNKYKEGVVLMEFRYSP

SEQ ID NO: 10 - protein, 25 aa, Plasmodium vivax
EDLAKHAVFNKYKEGVVLMEFRYSP

SEQ ID NO: 11 - protein, 29 aa, Plasmodium yoelii
KSMDTHPIRKLYDAGVKVSVNSDDPGMFL

SEQ ID NO: 12 - protein, 29 aa, Plasmodium falciparum
KSMDTHPIRMLYDAGVKVSVNSDDPGMFL

SEQ ID NO: 13 - protein, 29 aa, Plasmodium vivax
KSMDTHPIRQLYDAGVKVSVNSDDPGMFL

SEQ ID NO: 14 - protein, 364 aa, Plasmodium yoelii
MMEIPTEEIKFLKKEDVQNIDLNGMSKKERYEIWRRIPKVELHCHLDLTFSAEFFLKWARKYNLQPNMSDDEILDHYLFTKEGKSLAEFIRKAISVSDLYRDYDFIEDLAKWAVIEKYKEGVVLMEFRYSPTFVSSSYGLDVELIHKAFIKGIKNATELLNNKIHVALICISDTGHAAASIKHSGDFAIKHKHDFVGFDHGGREIDLKDHKDVYHSVRDHGLHLTVHAGEDATLPNLNTLYTAINILNVERIGHGIRVSESDELIELVKKKDILLEVCPISNLLLNNVKSMDTHPIRKLYDAGVKVSVNSDDPGMFLSNINDNYEKLYIHLNFTLEEFMIMNNWAFEKSFVSDDVKSELKALYF

SEQ ID NO: 15 - protein, 367 aa, Plasmodium falciparum
MNCKNMDTSYEIINYLTKDELDIDLSCMDKKERYKIWKRLPKCELHCHLDVCFSVDFFLNVIRKYNIQPNMSDEEIIDYYLFSKPGKSLDEFVEKALRLTDIYIDYTVVEDLAKHAVFNKYKEGVVLMEFRYSPSFMSFKHNLDKDLIHEAIVKGLNEAVALLEYKIQVGLLCTGDGGLSHERMKEAAEFCIKHKKDFVGYDHAGHEVDLKPFKDIFDNIREEGISLSVHAGEDVSIPNLNSLYTAINLLHVKRIGHGIRVSESQELIDLVKEKDILLEVCPISNVLLNNVKSMDTHPIRMLYDAGVKVSVNSDDPGMFLTNITDNYEELYTHLNFTLADFMKMNLWAVQKSFVDPDIKNKIISKYF

SEQ ID NO: 16 - protein, 363 aa, Plasmodium vivax
MNILQEPIDFLKKEELKNIDLSQMSKKERYKIWKRIPKCELHCHLDLCFSADFFVSCIRKYNLQPNLSDEEVLDYYLFAKGGKSLGEFVEKAIKVADIFHDYEVIEDLAKHAVFNKYKEGVVLMEFRYSPTFVAFKYNLDIELIHQAIVKGIKEVVELLDHKIHVALMCIGDTGHEAANIKASADFCLKHKADFVGFDHGGHEVDLKEYKEIFDYVRESGVPLSVHAGEDVTLPNLNTLYSAIQVLKVERIGHGIRVAESQELIDMVKEKNILLEVCPISNVLLKNAKSMDTHPIRQLYDAGVKVSVNSDDPGMFLTNINDDYEELYTHLNFTLEDFMKMNEWALEKSFMDSNIKDKIKNLYF

SEQ ID NO: 17 - protein, 1092 aa, Plasmodium yoelii
ATGATGGAAATTCCAACTGAAGAAATAAAGTTCCTCAAAAAGGAAGATGTACAAAACATCGATTTAAACGGAATGAGTAAAAAAGAAAGATATGAAATATGGAGAAGAATTCCCAAAGTTGAATTACATTGCCATTTAGATTTAACATTTTCTGCTGAATTTTTTTTAAAATGGGCTCGAAAATATAATCTACAACCTAACATGTCAGATGACGAAATACTTGATCATTATTTATTTACAAAAGAAGGAAAATCATTAGCAGAATTTATTAGAAAAGCAATAAGTGTTTCTGATTTATATAGAGATTATGATTTTATTGAAGATTTGGCCAAATGGGCAGTTATTGAAAAATATAAAGAAGGTGTTGTTTTAATGGAATTTCGATATTCACCAACTTTTGTTTCTTCATCTTATGGATTAGATGTAGAATTGATTCATAAAGCATTTATAAAAGGAATAAAAAATGCTACAGAATTATTAAACAATAAAATACATGTTGCATTAATATGTATTAGTGATACTGGACATGCTGCTGCTAGTATTAAACATTCTGGAGATTTTGCAATTAAACATAAACATGATTTCGTTGGTTTTGATCATGGTGGACGTGAAATAGATTTAAAAGATCATAAAGATGTATATCATTCAGTTAGGGATCATGGTTTACATCTAACTGTACATGCAGGTGAAGATGCAACTTTACCAAATCTAAATACTTTATATACTGCTATCAATATTTTAAATGTTGAACGTATTGGTCATGGTATAAGAGTTTCAGAATCAGATGAACTAATTGAATTAGTTAAAAAAAAAGATATCTTATTAGAAGTATGCCCAATATCTAATCTTTTATTAAATAATGTTAAATCTATGGATACACATCCAATTAGAAAATTATATGATGCTGGTGTTAAAGTATCTGTTAATTCCGATGATCCTGGAATGTTTTTATCAAACATAAATGATAATTACGAAAAATTATATATCCATCTAAATTTTACATTAGAAGAATTTATGATTATGAATAACTGGGCTTTTGAAAAATCTTTCGTTAGTGACGATGTTAAAAGCGAGCTTAAAGCGTTGTACTTT

SEQ ID NO: 18 - protein, 1101 aa, Plasmodium falciparum
ATGAATTGTAAGAATATGGATACTTCATATGAGATTATTAATTATTTAACAAAGGATGAGCTTGATATAGATTTATCATGTATGGATAAGAAGGAAAGATATAAAATATGGAAACGACTTCCCAAATGCGAATTACATTGTCATTTAGATGTATGTTTTTCTGTTGATTTTTTTTTGAATGTTATTCGTAAATATAATATACAACCAAATATGAGTGATGAAGAAATTATCGATTATTATTTATTTTCCAAACCTGGTAAATCATTAGATGAATTTGTTGAAAAAGCTTTAAGGTTAACCGATATATATATTGATTATACTGTTGTTGAAGATTTAGCAAAACATGCTGTATTTAACAAATATAAAGAAGGTGTTGTTTTAATGGAGTTTCGTTATTCTCCTTCTTTCATGTCCTTCAAACATAATTTAGATAAAGATCTTATCCATGAAGCTATTGTTAAAGGTCTTAATGAAGCCGTTGCTTTGTTAGAATATAAAATACAAGTAGGATTACTTTGTACAGGTGATGGTGGCCTTTCACATGAAAGAATGAAAGAAGCTGCTGAATTCTGTATTAAACATAAAAAAGATTTTGTTGGTTATGATCATGCTGGACATGAAGTTGACCTTAAACCATTTAAAGATATCTTTGATAATATAAGAGAAGAAGGTATCTCCTTATCTGTACACGCTGGAGAAGATGTAAGCATACCAAATTTAAATTCTCTTTATACAGCCATCAACTTATTACATGTTAAAAGAATTGGACATGGTATTAGAGTTTCAGAATCTCAAGAATTAATTGACTTAGTAAAAGAAAAAGACATCTTGCTAGAAGTCTGTCCTATATCTAATGTATTATTAAACAATGTCAAATCTATGGACACACACCCTATTAGAATGTTGTATGATGCTGGTGTAAAAGTGTCGGTAAATTCTGATGATCCAGGAATGTTCTTAACCAACATTACAGATAATTATGAAGAATTATATACACACTTAAATTTTACATTGGCTGATTTTATGAAAATGAACCTCTGGGCTGTGCAAAAATCTTTTGTAGACCCAGATATAAAAAATAAAATTATAAGTAAATATTTT

SEQ ID NO: 19 - DNA, 1089 bp, Plasmodium vivax
atgaacatcctgcaagaacccatcgacttcctcaaaaaggaggagctgaaaaacatcgacctatcccagatgagcaaaaaggaaagatacaaaatttggaagaggataccaaagtgtgaattacactgccatctggacctctgcttctccgcagacttcttcgtcagctgcattcgaaaatataatttgcagccgaatttatctgatgaggaggtgctagattattacttgtttgcaaaaggagggaagtctttaggagagttcgtcgaaaaggcaataaaagtggcagatatatttcacgactacgaagtgattgaggatttggccaagcacgcagtgtttaacaaatataaagaaggagtcgtcctgatggaattccgttactctccaacgtttgttgccttcaagtataaccttgacattgagctcattcaccaagcgatcgtgaagggcataaaggaagtcgtagaattgttagaccataaaattcacgtggctctcatgtgcattggagatacaggccatgaagcagcaaacattaaagcttctgctgatttttgcttaaaacataaggcagattttgtaggctttgatcacggtggacatgaagtagatttaaaagagtataaagaaattttcgattacgtgagagaaagtggtgtgcctctttctgtccacgcaggggaagatgtgactctcccaaatttaaacaccctatactcagctatacaagtacttaaagtggaaagaattggacacggaattagggttgctgaatcgcaagaactaatcgatatggttaaggagaaaaatattttacttgaagtttgccccatttcaaatgtgctgctgaaaaatgcaaagtccatggatactcaccctattagacaattgtacgatgctggagtgaaggtctctgtcaattcggatgacccaggaatgttcctcaccaacatcaatgacgattacgaggagttatacacccacttgaattttaccctcgaagattttatgaagatgaatgagtgggctttggagaagtccttcatggattcgaacataaaggacaaaataaagaacctctacttt

SEQ ID NO: 20 - protein, 33 aa, Plasmodium yoelii
MKKDREPIDEDEMRITSTGRMTNYVNYGAKILG

SEQ ID NO: 21 - protein, 30 aa, Plasmodium yoelii
KIKATGNAIGKAVTLAEIIKRRFKGLHQIT

SEQ ID NO: 22 - protein, 17 aa, Plasmodium yoelii
KDAGYQPPLDEKYVKEM

SEQ ID NO: 23 - protein, 24 aa, Plasmodium yoelii
  MISC_FEATURE (18)..(18): X be a serine (S) residue or a threonine (T) residue
KDAGYQPPLDEKYVKEMXPEEIVN

SEQ ID NO: 24 - protein, 241 aa, Plasmodium yoelii
MKKDREPIDEDEMRITSTGRMTNYVNYGAKILGEEDKKSLKIKATGNAIGKAVTLAEIIKRRFKGLHQITKCGSTVIADQYVSGQDNSEHVIQEKTVSFIDILLSRDQLDVKDAGYQPPLDEKYVKEMSPEEIVNSRPFRGRSFRPRFFRGFRGGGRGGFMRRGGYKFFGDRMYDSRNGFRDGRGYGGSFGRGGGFRSGGGMGGNGRGGFRGFRDGRDGDYRSGRGFRGGRNGFRGGRALS

SEQ ID NO: 25 - protein, 248 aa, Plasmodium falciparum
MKKDREPIDEDEMRITSTGRMTNYVNYGAKILGDEDKKSIKIKATGNAIGKAVTLAEIIKRRFKGLHQITRCGSTVITDQYVSGQDNSEHVVQEKTVSFIEILLSREQLDMKDAGYQPPLDEKYVKEMTPEEIVNSRPFRRGGFRPRFYRGFRGGRGGFLRRGGYRGFGDRVYEPRSSFRGGRGSGYGGNFGRGGYRSGGGMGGGFRGGFRGGFRGGRDGGYRGGNRGGSRSGFRGGRGGFRGGRALS

SEQ ID NO: 26 - protein, 241 aa, Plasmodium vivax
MKKDREPIDEDEMRITSTGRMTNYVNYGAKILGEEDKKSLKIKATGNAIGKAVTLAEIIKRRFKGLHQITRCGSTVITDQYVSGQDNNEHVVQEKTVSFIDILLSRDQLDVKDAGYQPPLDEKYVKEMSPEEIVNTRPFRGRGFRPRFFRGFRGGRGGFMRRGGYRPFGDRMYEGRNSFRGGRGYGGSFGRGGYRSGGGMGVSGRGGFRGGFRGGRDGGYRGGRGGFRGGRGGFRGGRALS

SEQ ID NO: 27 - DNA, 723 bp, Plasmodium yoelii
atgaagaaagatagagagccaatagacgaagatgaaatgagaattacatcaacaggtcgaatgaccaattatgttaactatggtgcaaaaatattaggagaggaagataagaagagtttaaaaattaaagccacgggaaatgcaattggtaaagccgtaactttagcagaaattataaaaagaagatttaaaggattacatcaaataactaaatgtggtagcacagttattgctgatcaatacgtaagtggccaagataatagcgaacatgttattcaagaaaaaacagtatcttttattgacatattattatcaagagatcaattagatgtaaaagatgcaggataccaaccacctttagatgaaaaatacgttaaagaaatgtcccctgaagaaattgtaaacagcaggccatttagaggaagaagttttaggcccagatttttccgtgggttcagaggcggtggccgtggtggctttatgagaagaggtggatacaaattctttggtgatagaatgtatgacagtagaaatggatttagagatggtagaggatatggtggaagtttcggacgtggtggtggattcagatcaggtggtggtatgggaggaaatggaagaggtggctttagaggattcagagatggaagagacggagattacagaagtggccgtggattcagaggaggtagaaacggattcagaggtggcagagccttatca

SEQ ID NO: 28 - DNA, 744 bp, Plasmodium falciparum
atgaagaaagatagagaaccaatagacgaagatgaaatgagaataacctcaaccggaaggatgaccaactatgttaactatggtgcaaaaatactaggagatgaagacaaaaaaagtataaaaattaaagcaacaggtaatgctattggaaaagctgtaacattagcagaaataataaaaagaagatttaaaggattacatcaaataaccagatgtggaagtacagttatcactgatcaatatgtaagtggacaagataatagcgaacatgtagtacaagaaaaaaccgtttcatttattgaaatattattatctagagaacaattagatatgaaagatgcaggttatcaaccacctttggatgagaaatatgtaaaagaaatgaccccagaagaaattgtcaattctaggccattcagaagaggtggatttagaccacgattttatagaggatttagaggaggaagaggtggatttttaagaagaggaggatatagaggttttggtgacagagtatatgaaccaagaagtagcttcagaggtggaagaggtagcggatatggtggaaatttcggaagaggtggatacagatcaggtggtggtatgggtggtggattcagaggtggattcagaggaggatttagaggtggaagagatggtggctacagaggtggaaacagaggaggtagcagaagtggatttagaggtggcagaggtggattcagaggtggaagagctttatca

SEQ ID NO: 29 - DNA, 723 bp, Plasmodium vivax
atgaagaaagatagagagccaatagacgaagatgaaatgagaatcacgtccaccggaaggatgaccaactatgtgaactatggtgccaaaattttaggggaagaagataaaaaaagcttgaaaataaaagccacgggaaacgccatcggaaaagcagtaactctagcggaaataatcaaaaggagatttaaagggttgcatcagattaccaggtgcggtagtacagtcatcacggaccagtacgttagtggacaagacaacaacgaacatgttgtgcaagagaaaaccgtttcttttattgacattctgctatcgagagatcagttagatgtgaaagacgcaggctaccaaccaccattggatgagaaatatgtgaaagaaatgtcacctgaagaaattgtgaacacgagaccatttagaggaagaggattcagacccagattcttccgtggatttagaggtggcagaggtgggttcatgagacgaggtggatataggccatttggagatagaatgtatgaaggtagaaacagctttagaggaggcagaggatatggtggcagttttggtagaggtggttacagatctggtggcggaatgggcgtatccggaagaggcggtttcagaggaggattccgtggaggcagagatggcggttaccgcggaggtagaggtggtttccgaggtggcagaggtggcttcagagggggcagggctttatca

SEQ ID NO: 30 - protein, 172 aa, Plasmodium yoelii
MGKEKTHINLVVIGHVDSGKSTTTGHIIYKLGGIDRRTIEKFEKESAEMGKGSFKYAWVLDKLKAERERGITIDIALWKFETPRYFFTVIDAPGHKDFIKNMITGTSQADVALLVVPAEVGGFEGAFSKEGQTKEHALLAFTLGVKQIVVGVNKMDTVKYSEDRYEEIKKEV

SEQ ID NO: 31 - protein, 170 aa, Plasmodium yoelii
DYLKKVGYQADKVDFIPISGFEGDNLIEKSDKTPWYKGRTLIEALDTMEPPKRPYDKPLRIPLQGVYKIGGIGTVPVGRVETGILKAGMVLNFAPSAVVSECKSVEMHKEVLEEARPGDNIGFNVKNVSVKEIKRGYVASDTKNEPAKGCSKFTAQVIILNHPGEIKNGY

SEQ ID NO: 32 - protein, 26 aa, Plasmodium yoelii
HISCKFLNIDSKIDKRSGKVVEENPK

SEQ ID NO: 33 - protein, 36 aa, Plasmodium yoelii
LEPKKPMVVETFTEYPPLGRFAIRDMRQTIAVGIIK

SEQ ID NO: 34 - protein, 443 aa, Plasmodium yoelii
MGKEKTHINLVVIGHVDSGKSTTTGHIIYKLGGIDRRTIEKFEKESAEMGKGSFKYAWVLDKLKAERERGITIDIALWKFETPRYFFTVIDAPGHKDFIKNMITGTSQADVALLVVPAEVGGFEGAFSKEGQTKEHALLAFTLGVKQIVVGVNKMDTVKYSEDRYEEIKKEVKDYLKKVGYQADKVDFIPISGFEGDNLIEKSDKTPWYKGRTLIEALDTMEPPKRPYDKPLRIPLQGVYKIGGIGTVPVGRVETGILKAGMVLNFAPSAVVSECKSVEMHKEVLEEARPGDNIGFNVKNVSVKEIKRGYVASDTKNEPAKGCSKFTAQVIILNHPGEIKNGYTPVLDCHTSHISCKFLNIDSKIDKRSGKVVEENPKAIKSGDSALVTLEPKKPMVVETFTEYPPLGRFAIRDMRQTIAVGIIKSVEKKEPGAVSAKAPAKK

SEQ ID NO: 35 - protein, 443 aa, Plasmodium falciparum
MGKEKTHINLVVIGHVDSGKSTTTGHIIYKLGGIDRRTIEKFEKESAEMGKGSFKYAWVLDKLKAERERGITIDIALWKFETPRYFFTVIDAPGHKDFIKNMITGTSQADVALLVVPAEVGGFEGAFSKEGQTKEHALLAFTLGVKQIVVGVNKMDTVKYSEDRYEEIKKEVKDYLKKVGYQADKVDFIPISGFEGDNLIEKSDKTPWYKGRTLIEALDTMEPPKRPYDKPLRIPLQGVYKIGGIGTVPVGRVETGILKAGMVLNFAPSAVVSECKSVEMHKEVLEEARPGDNIGFNVKNVSVKEIKRGYVASDTKNEPAKGCSKFTAQVIILNHPGEIKNGYTPVLDCHTSHISCKFLNIDSKIDKRSGKVVEENPKAIKSGDSALVSLEPKKPMVVETFTEYPPLGRFAIRDMRQTIAVGIIKSVEKKEPGAVTAKAPAKK

SEQ ID NO: 36 - protein, 443 aa, Plasmodium vivax
MGKEKTHINLVVIGHVDSGKSTTTGHIIYKLGGIDRRTIEKFEKESAEMGKGSFKYAWVLDKLKAERERGITIDIALWKFETPRYFFTVIDAPGHKDFIKNMITGTSQADVALLVVPAEVGGFEGAFSKEGQTKEHALLAFTLGVKQIVVGVNKMDTVKYSEDRYEEIKKEVRDYLKKVGYQADKVDFIPISGFEGDNLIEKSDKTPWYKGRTLIEALDTMEPPKRPYDKPLRIPLQGVYKIGGIGTVPVGRVETGILKAGMVLNFAPSAVVSECKSVEMHKEVLEEARPGDNIGFNVKNVSVKEIKRGYVASDTKNEPAKGCSKFTAQVIILNHPGEIKNGYSPVLDCHTAHISCKFLNIDSKIDKRSGKVVEENPKSIKSGDSALVSLEPKKPMVVETFTEYPPLGRFAIRDMRQTIAVGIIKAVEKKEPGAVSAKNPAKK

SEQ ID NO: 37 - DNA, 1329 bp, Plasmodium yoelii
atgggaaaggaaaaaactcacattaacttagtcgtcatcgggcatgtcgatagtggtaaatccacaactactggtcacattatttacaaattaggaggtattgatagaagaactattgaaaagttcgaaaaggaatcagctgaaatgggaaagggtagtttcaaatatgcatgggttttagataaacttaaggccgaaagagaaagaggtattactattgatatcgctttatggaaatttgaaaccccaagatatttcttcacagttattgatgcaccaggtcacaaagattttattaaaaatatgattactggtacctctcaagctgatgttgcattattagttgttccagctgaagttggtggttttgaaggtgctttctccaaggaaggtcaaaccaaagaacatgctttgttagcctttactttaggagttaaacaaattgttgttggtgttaacaagatggatacagttaaatattcagaagatcgttatgaagaaatcaagaaggaagttaaggattacttaaagaaggtaggatatcaagccgataaagttgactttatcccaatatccggttttgaaggtgataacttaattgaaaaatcagataaaaccccatggtataagggaagaacccttattgaagctttggatactatggaaccacccaaaagaccatatgacaaaccattaagaattccattacaaggtgtatacaaaatcggtggtatcggtactgtccctgtaggtcgtgttgaaactggtattttaaaagctggtatggtattaaacttcgctccatccgctgttgtttcggaatgtaaatctgttgaaatgcacaaagaagtattagaagaagccagaccaggagataacattggatttaacgttaaaaacgtatcagttaaagaaattaaaagaggatacgttgcttcagataccaagaatgaaccagctaagggatgctctaaatttacagcacaagttattatcttaaatcaccctggtgaaatcaaaaacggttataccccagttttagattgtcacacatcccacatttcttgtaaatttttaaatatcgactctaaaatcgataaacgttcaggaaaagttgttgaagaaaacccaaaagctatcaaatcaggagattcagctttagttactttagagccaaagaaacctatggttgttgaaactttcactgagtacccaccattaggaagatttgctattagagatatgagacaaaccattgccgtcggtattattaaatctgttgaaaagaaagaacccggagctgtctcagccaaagcaccagcaaaaaaa

SEQ ID NO: 38 - DNA, 1329 bp, Plasmodium falciparum
atgggtaaggaaaaaacacatattaacttagttgttattggtcacgtcgatagtggaaaatcaaccactacaggtcacattatttacaaattaggaggtatagatagaagaactattgaaaaatttgagaaagaatctgctgaaatgggtaagggtagttttaaatatgcatgggttttagataaacttaaggcagaaagagaaagaggtattaccattgatattgccttatggaaatttgaaaccccaaggtatttctttactgtcattgatgcaccaggtcacaaggattttattaaaaatatgattacaggtacatcacaagcagatgttgctttattagttgtcccagctgaagtaggtggtttcgaaggtgccttttcaaaggaaggtcaaacaaaggaacacgctttattagcatttaccttaggtgtaaaacaaattgttgtcggtgttaacaagatggatactgtcaaatattctgaagacagatatgaagaaattaaaaaagaagttaaggattacttgaagaaagtaggataccaagctgataaagttgattttattccaatttctggttttgaaggtgataatttaatcgaaaaatcagataaaacaccatggtataaaggaagaaccttaatagaagcccttgatactatggaaccaccaaagagaccttacgacaagccattaagaattccacttcaaggtgtttacaaaatcggtggtattggtaccgtccctgttggtcgtgttgaaacaggtatcttaaaagccggtatggttttaaacttcgctccatcagctgttgtgtctgaatgtaaatcagttgaaatgcacaaggaagttttggaagaagctagaccaggagacaacattggttttaacgtaaagaatgtttctgttaaagaaatcaagagaggttacgttgcttcagatactaaaaatgaaccagcaaaaggatgctccaaatttactgctcaagttattatattgaaccaccctggtgaaatcaaaaatggttataccccagttttggattgtcacacatctcacatttcatgtaaatttttaaacatcgactccaagatcgacaaacgttcaggtaaagttgttgaagaaaacccaaaagctatcaaatcaggagattcagctttagttagtttagaacctaagaaacctatggttgtcgaaacctttactgaatatccaccattaggaagatttgctattcgtgatatgagacaaaccattgctgtcggtatcattaaatcagttgaaaagaaagaacctggagctgtcacagctaaagcaccagccaaaaaa

SEQ ID NO: 39 - DNA, 1329 bp, Plasmodium vivax
atgggaaaggaaaaaacacatatcaacttagtcgttatcggccatgtcgatagtggaaaatccacgaccaccggtcatattatttacaagttgggaggtattgacaggagaaccatagaaaagtttgagaaagagtccgccgaaatgggtaagggtagttttaagtacgcgtgggtgttggataagctaaaggccgaaagagaaagaggtatcactatcgatatcgccttatggaagttcgaaacgcccaggtacttcttcacagtcattgatgcccccggtcataaggattttatcaaaaatatgattacgggtacgtcgcaggctgatgtggctctcttggttgttcctgctgaggttggtggttttgaaggtgccttttcaaaggaaggtcaaactaaggaacacgccttgttagccttcaccctcggtgtgaaacagatcgttgttggtgtcaacaagatggacactgtgaaatactcagaagatagatacgaagaaattaagaaggaagttagggattacctgaaaaaggtcggataccaagctgacaaggttgactttatccccatttctggatttgaaggtgataacctgattgagaagtcagacaagaccccatggtataaaggaaggaccttgatcgaggctttggacactatggaaccacccaagagaccatacgacaaacctttaagaattccactccaaggtgtgtacaaaattggtggtattggtaccgtgcccgttggcagagtcgaaactggtattttgaaggccggtatggttctcaactttgccccatctgctgtcgtttcggagtgtaaatccgtcgaaatgcacaaagaagttttggaagaggcaagaccaggtgacaacatcggatttaacgtaaagaacgtttctgttaaagaaatcaagagaggatatgtcgcttctgataccaagaatgagccagccaagggatgctccaaatttactgcccaggttatcattttgaaccatcctggagaaattaagaacggatacagtcccgtcctagattgccacactgctcacatttcttgcaaatttttgaacatcgactcgaagattgacaagcgttctggtaaggtcgttgaggaaaaccctaaatcaattaagtctggtgattcagccttggttagtctcgagccaaagaagcctatggttgttgagaccttcactgagtatccacccctaggaagatttgctattcgagatatgagacaaaccatcgctgtcggtatcatcaaggcggtcgaaaagaaggagccaggtgccgtgtccgctaaaaacccagcgaagaaa

SEQ ID NO: 40 - protein, 20 aa, Plasmodium yoelii
  MISC_FEATURE (8)..(8): X is a threonine (T) residue or a serine (S) residue
GKVAIILXGKHMGKRCIITK

SEQ ID NO: 41 - protein, 26 aa, Plasmodium yoelii
  MISC_FEATURE (13)..(13): X is an isoleucine (I) residue, a valine (V) residue, an asparagine (N) residue, or a threonine (T) residue
  MISC_FEATURE (15)..(15): X is an isoleucine (I) residue, a valine (V) residue, an asparagine (N) residue, or a threonine (T) residue
GKHMGKRCIITKXLXSGLLAVVGPYE

SEQ ID NO: 42 - protein, 20 aa, Plasmodium yoelii
  MISC_FEATURE (12)..(12): X is a valine (V) residue or an isoleucine (I) residue
SGLLAVVGPYEXNGVPLKRV

SEQ ID NO: 43 - protein, 20 aa, Plasmodium falciparum
GKVAIILTGKHMGKRCIITK

SEQ ID NO: 44 - protein, 20 aa, Plasmodium vivax
GKVAIILSGKHMGKRCIITK

SEQ ID NO: 45 - protein, 26 aa, Plasmodium yoelii
GKHMGKRCIITKILNSGLLAVVGPYE

SEQ ID NO: 46 - protein, 26 aa, Plasmodium vivax
GKHMGKRCIITKVLTSGLLAVVGPYE

SEQ ID NO: 47 - protein, 20 aa, Plasmodium yoelii
SGLLAVVGPYEVNGVPLKRV

SEQ ID NO: 48 - protein, 20 aa, Plasmodium falciparum
SGLLAVVGPYEINGVPLKRV

SEQ ID NO: 49 - protein, 234 aa, Plasmodium yoelii
MAKNNKNTKSVVSSDDKKSLLKHYVIKGQHKILTPIQAKKTISKKHYGRKIASKKKYIVQRKMRKSIQIGKVAIILTGKHMGKRCIITKILNSGLLAVVGPYEVNGVPLKRVDPRYLIVTSTNVFDLNNLSQIKDKFIQTAEDIHDDIFIKSNDIKKRQKKLLKNKNESLFMNDVIQQIKEIRDSDPKMKKIKSLQKQLGDLLKPEMSKDKMLRSYLKSKFTLRNNMSFHTIKF

SEQ ID NO: 50 - protein, 221 aa, Plasmodium falciparum
MTNTSNELKHYNVKGKKKVLVPVNAKKTINKKYFGRKVASKKKYVVQRKLRKSIEVGKVAIILTGKHMGKRCIITKILNSGLLAVVGPYEINGVPLKRVDSRYLVVTSTNIFNFENIAKLKDDFLNYAQDIDDDSFIKTLEIKKKQKKLLKNKNEALFMNNVIDKIKEIRKEDPKVQKLEGIQKDIGSLLKPEILKNKVFAHYLKSKFTLRNDMVLHKMKF

SEQ ID NO: 51 - protein, 231 aa, Plasmodium vivax
MAKDNKGKVKKAAGEETVKYYRVKGKKKILIPVKAKKTIAKKYYGRKLASKKKYIVQGKMRKSIEVGKVAIILSGKHMGKRCIITKVLTSGLLAVVGPYEVNGVPLKRVNPRYVVVTSTNIFKFENMAGLKDEFVKLAEQIEDNSFVKSLEIKKKQKKLLSKKNEGLFMNDVITKIKELMKEDPKMQQLQKIQKEIGTLLKDEIAKNKIFAEYLKSKFTLRNDMALHKMKF

SEQ ID NO: 52 - DNA, 702 bp, Plasmodium yoelii
atggctaagaataacaaaaatacaaaaagtgtggtatcatctgatgataaaaaaagccttttaaaacattatgtaataaaagggcaacacaaaattcttaccccaatacaagcaaaaaaaacaatttctaaaaaacactatggaagaaaaatagcatcaaaaaaaaaatatattgtacaaaggaaaatgagaaaatctatccaaattggaaaagtagcaattatattaacaggaaaacatatgggtaaaagatgtataataactaaaattttaaattcaggattattagcagtggttggaccatatgaagttaatggggtacctttaaaaagagtagatccaagatatttgatagtaacatctacaaatgtttttgatttaaataatttatcacaaattaaagataaatttattcaaactgctgaagatatacatgatgatatttttataaaatctaatgatattaaaaaaaggcaaaaaaaattattaaaaaataaaaatgaatctctttttatgaatgatgttatacaacaaattaaagaaatacgagattctgatccaaaaatgaaaaaaataaaatcattacaaaaacaattaggagatttattaaaaccagaaatgtcaaaagataaaatgttaagatcatatctaaaatcaaaattcactttacgaaataatatgtcttttcatactattaaattt

SEQ ID NO: 53 - DNA, 663 bp, Plasmodium falciparum
atgacaaacacaagcaacgaattaaagcactataatgtgaaaggaaagaaaaaagttttagtaccggtaaatgcaaaaaaaaccattaacaagaaatacttcggaaggaaagttgcttccaaaaagaaatatgttgtacaaagaaaattaaggaaatctatagaagtaggaaaggtagccatcatattaacaggaaaacatatgggtaagagatgtataataaccaaaattttaaattcaggattattagctgtagtaggtccatatgaaattaatggggttcctttaaaaagagttgattcaagatatttagttgttacatctactaatatttttaactttgaaaatatagccaagttaaaagatgacttccttaactatgctcaagatattgatgatgattcttttattaaaaccttagaaattaaaaaaaaacaaaagaaactcttaaaaaataaaaatgaagccctctttatgaataatgttattgacaaaattaaagaaatcagaaaagaagatccaaaggttcagaaattagaaggtatacaaaaagatattggaagtttgttaaaaccagaaattttaaaaaataaagtcttcgctcattacttaaaatctaaatttaccttaagaaatgatatggttttacacaaaatgaagttt

SEQ ID NO: 54 - DNA, 693 bp, Plasmodium vivax
atggcgaaggacaacaagggaaaggtgaagaaggccgcgggcgaagaaacagtcaagtactacagagtgaagggcaagaaaaaaattttaatcccagttaaggccaagaaaaccattgcgaagaaatactatggaaggaaattagcgtcaaagaagaaatacattgtgcaggggaaaatgagaaagtcgatcgaagttggaaaagttgcaattatattgtcaggcaaacacatgggaaagagatgcataattacgaaggtattaacctcagggctgttagctgtcgtaggtccgtatgaagtaaacggggtccctttaaagagagttaacccacgatacgtcgtagtgacatccacgaacatttttaaatttgaaaatatggcagggctgaaggatgaatttgtcaaactggccgaacagatcgaagataattcttttgttaaatctttggaaataaaaaaaaagcaaaagaaacttctcagcaaaaagaatgaaggcctcttcatgaatgacgtgattaccaaaattaaggagttgatgaaggaggaccccaagatgcagcagttgcaaaaaatccagaaggaaattggcaccctactgaaggatgaaattgccaagaacaaaatctttgcagagtatttgaagtccaaatttacactgcgaaacgatatggctctgcacaaaatgaagttc

SEQ ID NO: 55 - protein, 24 aa, Plasmodium yoelii
LEKKMQLKKEGKLLSAKAKEEKKK

SEQ ID NO: 56 - protein, 44 aa, Plasmodium yoelii
IVCILGHVDTGKTKLLDKLRHTNVQDNEAGGITQQIGATFFPKD

SEQ ID NO: 57 - protein, 70 aa, Plasmodium yoelii
SKGIMIIDTPGHESFYNLRKRGSSLCDIAILVIDLMHGLEQQTKESIQILKQRNCPFVIALNKIDRLYMW

SEQ ID NO: 58 - protein, 26 aa, Plasmodium yoelii
KLECTVLEVKNIEGLGTTIDVILTNG

SEQ ID NO: 59 - protein, 21 aa, Plasmodium yoelii
GVGLYVMASTLGSLEALLIFL

SEQ ID NO: 60 - protein, 35 aa, Plasmodium yoelii
  MISC_FEATURE (14)..(14): X is a serine (S) residue or a threonine (T) residue
MTDVSDVFNHVDKXGVGLYVMASTLGSLEALLIFL

SEQ ID NO: 61 - protein, 35 aa, Plasmodium yoelii
MTDVSDVFNHVDKSGVGLYVMASTLGSLEALLIFL

SEQ ID NO: 62 - protein, 35 aa, Plasmodium falciparum
MTDVSDVFNHVDKTGVGLYVMASTLGSLEALLIFL

SEQ ID NO: 63 - protein, 938 aa, Plasmodium yoelii
MSKNKKGKKKEDLDAILAELGIEEKREDQINENEGGEEKAENTQISKSKKRKEKLKQKKEQIKLKENDDTPIAQTEAVKEEDAKDGEKDGEKDGEQDGENNEAAKGKKKKKKKKEKESKAETGISAAAKAAAERLRLLKEFEEKQKEEERKKREEEEERIRKEEEEKEKKRLARLEKKMQLKKEGKLLSAKAKEEKKKRELYLQTLKESGMLIEPKEKAKAEIINLDINKAKLLLKKKKNKQISSGINNQNSDDKNKDDENKEDKNKDNENKEEEKEIVLDDWEDFLNMDNEEKKKTEKNDIDQNTKENKQTQIVKKSSINDKKGKKQKNNKNGEYNEDKDNEKTKDEEDIYRSSIVCILGHVDTGKTKLLDKLRHTNVQDNEAGGITQQIGATFFPKDVLDKEIKKIDKTIKCLSKGIMIIDTPGHESFYNLRKRGSSLCDIAILVIDLMHGLEQQTKESIQILKQRNCPFVIALNKIDRLYMWEKNDWEPFNDTFKNQKEYVKEEFKNRLQTILNELSEQGLNCQLYWENKNPRKFVSIVPTSAITGEGIADLIMVLVKLTQSFMLKNIEYNNKLECTVLEVKNIEGLGTTIDVILTNGVLKESDTLVLCGMNGPIVTVARALLTPQPLKELRIKNEYIHHKSIKACIGVKISANGLEEVLCGTSLFVANNNDEIEEYKKKVMTDVSDVFNHVDKSGVGLYVMASTLGSLEALLIFLNDSKIPVFSVNIGTVQKKDVKKASIMREKGKPEYAVILAFDVKIDPEAEKEAQILGVEIMQKDIIYHLFDAFTAYLKKIEDEKKQSKMADAIFPCEVSIINDCVFNKKDPIVVGVKIEAGILKIGTPLYIPEKNLKIGNVVSIESNKKSCNKAKKGEEVCVKIAGEPNVTYGRHFDFNQKIYSKITRESIDVLKQYFRNELTMDDWRLVVHLKKILNIL

SEQ ID NO: 64 - protein, 977 aa, Plasmodium falciparum
MSKNKKGKKKEDLDAILAELGIEEKREDDVKANENEENEPTKMSKSKKKKEKLKQKKEQMKNKEDDEKDDQKGIDGEKDTDQKKDQDDQKDDDNQNEADNQNEADNQNEGENQKKKKNKKKKDKEKKAGGAAGAATGGMSEIAKAAAERLRLLKEYEEKKKEEERLKKEEEEERIRKEEEEKEKKRIAKLEKKMQLKKEGKLLSAKAKEEKKKNEIYLKQLKESGMLIEPREKSKSEYINLDINKTKLLLKKKKTKSIMVPTSSNNNNLNDDDKNNKQMLSNSSLKLNEEDELQGSQKVDEKDIVLDNWEDFLHIDEAKKKEQEEIERKEKERKEKEKEEREKERKSVINNSSSSINYGRKSFHIKNDILMRKGNKKKIDNELDDDDNNEYRSAIVCILGHVDTGKTKLLDKLRHTNVQDNEAGGITQQIGATFFPKDVLDKEIKKIDDTIKCLSKGIMIIDTPGHESFYNLRKRGSSLCDIAILVIDLMHGLEQQTKESIQILKQRNCPFVIALNKIDRLYMWNKNDWSPFNNTFKKQKPDTQEEFHDRLKNIINELSEQGLNCQLYWENMNPRKYVSIVPTSAITGEGIADLIMVLVKLTQTFMLKNIQYHDKLECTVLEVKNIEGLGTTIDVILTNGILRESDTIVLCGINGPIVTVIRALLTPQPLKELRIKNEYIHHKYIKACIGVKISANNLEEVLCGTSLFVVNNIEEEEEYKKKVMTDVSDVFNHVDKTGVGLYVMASTLGSLEALLIFLNDSKIPVFGVNIGTIQKKDVKKASIMREKGRPEYAVILAFDVKIDPEAEKEAALLGVEIMQRDIIYHLFDSFTAYLKKIEEEKKQSKITDAIFPCELSVINDCVFNKKDPIVIGVRVECGQLKIGTPLFVPEKNIKIGNVVSVQSNKKNFDKARKGDEVCIKICGEPHVTYGKHFDSTQKIYSKITRESIDVLKEYFRSELTMEDWKLVVQLKKIFNIV

SEQ ID NO: 65 - protein, 1006 aa, Plasmodium vivax
MSKNKKGKKKDDLDAILAEFGIDEKREDEVKEQKEEAGQAGGGGVSGVVSGVAPAGAEENEAAKMSKSKKKKEKLKQKKEQMKGKENEEEGEGGEAKKGPGEQPPGAAADEAVDAVDANDANEDAKKNKKKKKKEKEKANEKKGTSGMSEMAKAAAERLRLLKEYEEKKREEERRKQEEEEERIRKEEEEKEKKRLAKLEKKMQLKKEGKLLSAKAKEEKKKKELYLKTLKESGVLVEPKEKTKAEIISIDLNKTKAFLKKKKNKTNANANVGAGANLNNNAEGGGGTTPQGGKLDESLGQDGAEKKVDPKEIVLDDWEDFLNVDEEGKKEKQPSEQKSGEKADRERNKSKEGKAAEGKAAEGKAAEGKAAEGKAADGKKSPKGEAPSAKKGKKKTDAGKSSGGEKNSHAQGESDGESEYRSAIVCILGHVDTGKTKLLDKLRHTNVQDNEAGGITQQIGATFFPKDILDKQIKKVDESIKCMSKGIMIIDTPGHESFYNLRKRGSSLCDIAILVIDLMHGLEQQTKESIQILKQRNCPFVIALNKIDRLYMWSKSDWSPFNYTFQNQKENTQEEFQDRLKNILNELAEQGLNCHLYWENPNPRKYVSIVPTSAITGEGIADLIMILVKLTQNFMLKNIEYHEKLECTVLEVKNIEGLGTTIDVILTNGVLKESDTIVLCGINGPIVTVIRALLTPQPLKELRIKNEYVHHKSIKACIGVKISANGLEEVLCGTSLFVANNTNEIEDYKKKAMTDVSDVFNHVDKTGVGLYVMASTLGSLEALLIFLKDSKIPVFAVNIGTVQKKDVKKASVMREKGKPEYSVILAFDVKIDPEAEKEAQILGVEIMQKDIIYHLFDAFTSYIKKIEEEKKQSKLTDAIFPCELSIVNDCVFNKKDPIVIGVKVDCGILKIGTPLYIPEKSLKIGNVVSILLNKKTCEKAKKGDEVSIKICGEPHITFGRHFDFNQKIYSKITRESIDVLKEYFRSELTMEDWRLVVQLKKIFNII

SEQ ID NO: 66 - DNA, 2814 bp, Plasmodium yoelii
atgagcaaaaataaaaaaggaaaaaagaaggaagatttagatgctattttagcagaattaggaattgaagaaaaaagagaagatcaaattaatgaaaatgaaggaggagaagaaaaagctgaaaatacacaaatatcaaaatcaaaaaaaagaaaagaaaaattaaaacaaaaaaaagaacaaataaaattaaaagaaaatgatgatacaccaatagcacaaacagaagctgttaaagaagaagatgcgaaagatggcgaaaaagatggcgaaaaagatggagaacaagatggtgaaaataatgaagcagctaaagggaaaaaaaaaaaaaaaaaaaaaaaagagaaagaatcaaaagcagaaactggtatatcagcagcagcaaaagcagctgctgaaagattaaggcttctaaaagaatttgaggaaaaacaaaaagaagaagaacgaaaaaaaagagaagaagaagaggaacgaattagaaaagaagaagaagaaaaagaaaaaaaaagattagcaagattagaaaaaaaaatgcaattaaaaaaagaaggaaaattattaagtgcaaaagctaaagaagaaaaaaaaaaaagagaattatatttacaaacattaaaagaatcaggaatgttaatagaacctaaagaaaaagcaaaagcagaaattataaatctagatataaataaagctaagttattattaaaaaaaaaaaaaaataaacaaatatcaagcggtataaataatcaaaatagtgatgataaaaataaagatgacgaaaataaagaagacaaaaataaagataacgaaaataaagaagaagaaaaagaaatcgttttagatgattgggaagattttttaaatatggataatgaagaaaaaaaaaaaacagaaaaaaatgatatcgatcaaaacacaaaagaaaataaacaaactcagattgtgaaaaaaagttctataaatgataaaaaaggaaaaaaacaaaaaaataataaaaatggagaatataatgaagataaagataatgaaaaaacaaaagatgaagaagatatatatcgatcatctattgtttgtattcttggtcatgtagatacaggaaaaacgaaattattagataaacttagacacacgaatgtacaagataatgaagcaggaggtattactcaacaaattggagcaacattttttccaaaagatgttttagataaagaaataaaaaaaatagataaaacaattaaatgtttatcaaaaggtattatgattatagatacaccaggtcatgaatctttttataatttaagaaaaagaggatcttctttatgtgatattgcaatattagttattgatctaatgcatgggttagaacaacaaacaaaagaatctattcaaattttgaaacaaagaaattgtccatttgtaattgcattaaataaaatagatagattatatatgtgggaaaaaaatgattgggaaccttttaatgatacatttaaaaatcaaaaagaatatgtaaaagaagagtttaagaatagattacaaactatattaaatgaattatcagaacaaggattaaattgtcaattatattgggaaaataaaaatccgagaaaatttgtatctatagttccgaccagtgctataacaggggaaggtatagcagatctaattatggtcttagttaaattaactcaaagttttatgttaaaaaatattgaatataataataaattagaatgtactgttttagaagttaaaaatattgaaggtttaggaacaacaatagatgtaatattaacaaatggggtcttaaaagaatcagatactcttgttttatgtggaatgaatggtcctatagtaacagtagctagagcattgttaactccccaacctttaaaagagttaagaataaaaaatgaatatattcatcataaaagtattaaagcatgtattggagttaaaatatcagcaaatggtttggaagaggttttatgtggtacatctttatttgtagctaataataatgatgaaatcgaagaatataaaaaaaaagttatgacagatgtatcagatgtttttaatcatgttgataaatccggtgttggtttatatgttatggctagtacattaggttctttagaagctttacttatatttttaaatgattccaaaattcctgttttttcagtaaatattggaactgttcaaaaaaaagatgtaaaaaaagctagtattatgagagaaaaaggaaaaccagaatatgcagttatattagcatttgatgttaaaatagatccagaagcagaaaaagaagcacaaatattaggtgttgaaattatgcaaaaagatattatatatcatttatttgatgcatttactgcttatttaaaaaaaatagaagatgaaaaaaaacaaagtaaaatggctgatgctatttttccatgtgaagtatctattataaatgattgtgtatttaataaaaaagatcctatagttgtaggtgttaagattgaagctggaattttaaaaataggtacccctttatatataccagaaaaaaacttaaaaattggaaacgttgtaagtattgaatcaaataaaaaaagttgtaataaagcaaaaaaaggtgaagaagtttgtgtaaaaatagctggtgaaccaaatgttacatatggacgtcattttgattttaaccaaaaaatatacagtaaaattacgagagaaagtattgatgttttaaaacaatatttcagaaatgaacttacaatggatgattggcgattagttgtgcatcttaaaaaaattctgaacatttta

SEQ ID NO: 67 - DNA, 2931 bp, Plasmodium falciparum
atgagtaaaaataaaaagggaaaaaagaaggaagatctcgatgctattctggccgaattaggaatagaagaaaaaagagaagatgacgtaaaagcaaatgaaaacgaggaaaatgaacctaccaaaatgtccaagtccaaaaagaaaaaggaaaaactcaaacaaaaaaaagaacaaatgaaaaataaagaagatgatgagaaggatgatcaaaaaggtatagatggtgaaaaagatacagaccaaaaaaaagatcaggatgaccaaaaagatgatgataaccaaaatgaagcggataaccaaaatgaagcagataatcaaaatgaaggtgaaaaccaaaaaaagaaaaaaaacaaaaagaaaaaagataaagaaaaaaaagctggtggagcagcaggagcagctacaggggggatgtctgaaatcgctaaagcagctgctgaaagattaaggttattaaaagaatatgaagaaaaaaagaaagaagaagaaagattgaaaaaagaagaagaagaagaaagaattagaaaagaagaagaagaaaaagaaaaaaaaagaattgcgaaattagaaaaaaaaatgcaattaaaaaaagaaggtaaattattaagtgctaaagctaaagaagaaaaaaaaaaaaatgaaatatatttaaaacaattaaaagaatcaggtatgctaatagaaccaagagaaaaaagcaaatctgaatatataaatctagatataaataaaaccaaattattattaaaaaagaaaaaaaccaaatcaataatggtacccacatcatcaaataataataatctaaatgatgatgataaaaataataaacaaatgttatcaaatagtagccttaaattaaacgaagaagatgaattacagggttctcaaaaagtagatgaaaaagatattgtactcgacaattgggaagattttttacatattgatgaagcaaaaaaaaaggaacaagaagaaattgaaagaaaagaaaaagaaagaaaagaaaaagaaaaagaagaaagagaaaaggaaaggaagtctgttataaataatagtagtagtagtataaattatggtaggaaaagttttcatattaaaaatgatatattaatgagaaaaggaaataagaaaaaaatcgataatgaattagatgatgatgataataatgaatatagatctgctattgtttgtatattaggtcatgtagatacagggaaaacaaaattattagataagttaagacatacaaatgttcaagataatgaagctggtggtataacacaacaaattggagcaacattttttccaaaagatgtattagataaagaaataaaaaaaattgatgatacaattaaatgtttatcaaaaggtattatgataatagatacacctggacatgaatccttttataatttaagaaaacgaggttcatccttatgtgacatagctatcttggttatagatttaatgcatggtttagaacaacaaacaaaagaatctattcaaatattaaaacaaagaaattgtccatttgttatagcattaaataaaatagacagattatatatgtggaataaaaatgattggtcaccatttaataatacttttaaaaaacaaaaaccagatacacaagaagaatttcatgatagattgaaaaatataattaatgaattatcagaacaaggtttaaattgtcaattatattgggaaaatatgaacccaagaaaatatgtatccatagtacctactagcgcaataacaggtgaaggtatagcagatttaattatggtgttagtaaagttaacacaaacatttatgttaaaaaatatacaatatcatgataaattagaatgtactgtattagaagtaaaaaatattgaaggtttaggaacaacaatagatgttatcttgacaaatggtatattaagagaatctgataccattgttttgtgtggaatcaatggacccatagtaaccgtgattagagcattgttaacaccacaacctttaaaagaattaagaattaaaaatgaatatatacatcataaatatattaaggcatgtataggagtaaaaatatcagcaaataatttagaagaagtcttatgtggtacatcattatttgttgtaaataatatagaagaagaagaagaatataaaaagaaagtaatgacagatgtatctgatgtatttaatcatgtagataaaacaggtgtaggtttatatgttatggctagtactttaggttcattagaagcattattaatttttctaaatgattccaaaattccagtatttggagtaaatataggaactattcaaaaaaaagatgtaaaaaaagctagtatcatgagagaaaaaggaagacctgaatatgctgtaatattagcctttgatgtaaaaatagatccagaggcagaaaaagaagcagctcttttaggtgtagaaattatgcaaagagatatcatctatcatctcttcgattcatttactgcatatctaaaaaaaatagaagaagagaaaaaacaaagcaaaattacagatgctatattcccttgtgaactttcagttataaatgattgtgtatttaacaaaaaagatccaatcgttataggagtaagagtagaatgtggtcaactcaaaataggaacacccctttttgtaccagaaaaaaatattaaaataggtaatgtagtaagtgttcaaagtaataaaaaaaatttcgataaagccagaaaaggagatgaagtatgtattaaaatttgtggggaaccacatgtaacatatggtaaacattttgattcaacacaaaaaatttatagtaaaattacaagagaaagtatagatgttctgaaagaatattttagaagcgagttaacaatggaagattggaagctcgtagtacagctcaaaaaaatatttaacattgta

SEQ ID NO: 68 - DNA, 3018 bp, Plasmodium vivax
atgagcaaaaataaaaaggggaagaagaaggacgacttggatgcgatcctcgccgaattcggcatcgacgagaagcgggaggatgaagtgaaggagcagaaggaagaggcgggacaagcgggtggcggaggagtcagcggcgtggtcagcggagtggcccctgccggggcggaggaaaacgaggcggccaaaatgtccaagtcgaaaaagaaaaaggaaaagctgaagcagaagaaggagcaaatgaagggcaaggagaatgaggaggagggagagggcggggaggcgaagaagggaccgggcgagcagccccccggtgccgccgcggatgaagcggtcgacgcggtggacgcgaatgacgcgaatgaggacgccaaaaagaacaaaaagaagaagaagaaggaaaaggagaaggccaacgaaaagaaaggcacctcggggatgtccgaaatggccaaggcagccgcggagagactcaggctgctaaaagaatacgaggaaaaaaaaagagaagaagaaaggaggaagcaagaagaggaagaagaaagaattagaaaggaggaggaagagaaggaaaaaaaacgactagccaaattggaaaaaaaaatgcagctaaaaaaggagggcaaactgctaagcgcaaaggcgaaagaagaaaaaaaaaaaaaagaattgtatttgaaaacgctgaaggagtccggggtgctggtcgagccgaaggaaaagaccaaagcggagatcatcagcatcgatttgaacaaaacgaaggccttcctgaagaagaagaagaacaaaacgaatgctaatgcgaacgtgggcgcgggtgccaacttgaataacaacgcggagggggggggaggcacaaccccccaggggggcaagctggacgagtcgctgggccaggacggcgcggaaaagaaagtggaccccaaggaaattgtcctggacgactgggaagacttcctcaacgtggatgaggagggcaaaaaggaaaaacagcccagtgagcagaagagtggcgagaaggccgacagggaaaggaacaaatcgaaggaggggaaagcggcggaggggaaagcggcggaggggaaagcggcggaggggaaagcggcagaggggaaagcggcggacgggaagaaatcccccaagggggaggcgcctagcgccaagaaggggaaaaaaaaaacggatgcgggcaaaagcagcggcggcgaaaaaaacagccacgcgcagggtgagtcagacggcgagagcgagtaccggtcagccatcgtgtgcatattggggcatgtggacacggggaaaacgaagctgctggacaagctgcgacataccaatgtgcaggataacgaggcgggaggaattacgcagcaaatcggagcgaccttcttcccaaaggatatcctcgacaagcaaataaaaaaagtggacgaaagcatcaagtgcatgtcgaagggaattatgattatagacactccggggcatgaatccttctacaatctgaggaagagaggctcctccctgtgcgatatagccattttggtgattgacctgatgcacggcctcgagcagcagacgaaggagtccatccaaattctaaagcagaggaactgccccttcgttattgcgctgaacaaaattgataggctctacatgtggagcaaaagtgactggtccccattcaactacacatttcaaaatcaaaaggaaaacacacaggaggagttccaggatagactgaagaatatccttaacgagctagccgagcaagggttgaactgtcacctctattgggaaaaccccaacccgaggaaatacgtttccattgtacccactagtgcaataacgggggagggtattgcggacctcatcatgattttagtaaaattgacccaaaattttatgcttaaaaatattgaataccacgagaaattagagtgcaccgttttggaagtaaaaaacattgaagggttaggcaccaccatcgatgttattctaaccaatggggtgctcaaagagtccgacacgattgtcctatgtggtatcaacggaccgatcgtgactgtcattagggccctcctaactccgcaacctctaaaagagttaagaataaaaaatgagtatgtgcatcacaaatctattaaggcatgcattggtgtaaaaatctctgccaatggattggaagaggtcctctgtggtacttccctattcgttgccaataatacaaacgaaattgaagactacaaaaagaaagcaatgaccgacgtttcggatgtgttcaatcacgtagataagacaggggtaggtctctacgtcatggctagcactcttggctcgttagaagcactactcatttttttaaaagattctaagatccccgtttttgctgtgaacatcgggacggtgcaaaagaaagacgtcaagaaagccagcgtcatgagggaaaaggggaaacccgaatactcagtcatcctagcctttgatgtaaaaatcgatccggaggcagaaaaggaagcgcaaattttaggagtggaaatcatgcagaaggatatcatttaccacctatttgatgccttcaccagttatattaaaaaaattgaagaggagaaaaaacagagcaaattgactgatgcaattttcccatgcgaactctccattgtgaacgactgcgtgtttaataagaaggatcccatcgtcattggggttaaggtagattgtggtattttaaaaattgggaccccactgtacatcccagagaagagcctaaaaataggcaacgtggttagcatcctcctgaacaagaaaacctgtgaaaaagccaaaaagggggacgaagtttccattaagatttgcggagaaccccacatcaccttcggaaggcacttcgactttaaccaaaagatttacagcaaaattaccagagagagcatcgacgtgttgaaggagtacttcaggagcgaactcaccatggaggactggcggctcgtcgtgcagctcaagaagatcttcaacatcatc

SEQ ID NO: 69 - protein, 21 aa, Plasmodium yoelii
NLFFAKQVIPNACATQAILSI

SEQ ID NO: 70 - protein, 22 aa, Plasmodium yoelii
  MISC_FEATURE (5)..(5): X is an S residue, a T residue, or an N residue
  MISC_FEATURE (15)..(15): X is an S residue, a T residue, or an N residue
NFDSXMKGLTLSNCXFLRNIHN

SEQ ID NO: 71 - protein, 22 aa, Plasmodium yoelii
NFDSTMKGLTLSNCNFLRNIHN

SEQ ID NO: 72 - protein, 22 aa, Plasmodium falciparum
NFDSSMKGLTLSNCTFLRNIHN

SEQ ID NO: 73 - protein, 22 aa, Plasmodium vivax
NFDSSMKGLTLSNCNFLRNIHN

SEQ ID NO: 74 - protein, 419 aa, Plasmodium yoelii
MQSENDSIGEWCLIESNPCIFYEMLKQMGAKNLSAEDVYDLDHFDNYINNKDEIKIEHILSIQEYRSEKEKEAGLKSKMETEPYNSDIDLEDKYNKLLNNFSHVFGIIFLFNIGKSYDRKKYKEHNIPENLFFAKQVIPNACATQAILSIIFNKNIKLNENIENIKTFSINFDSTMKGLTLSNCNFLRNIHNSFKTPVYIENDDLYHNKKKESNSFHFVSYIEFEKNVYLLDGLQEGPILITDKNDDEKKEIENNWINIARNHIKKDINIMSNSEDDTENRFNILAIIKDKECIINEYINIHRIFKQRISVKLISLGENIEFDDEINEDDYYFSNKIPSIDQLTSNIEKLHNILKKSSNEINFLENLLTKEIELKASWDKERTFKFYNFYPFIISSIDLMAKHKILKPSYEKEKQKRNN

SEQ ID NO: 75 - protein, 465 aa, Plasmodium falciparum
MARDNENILEEWCLIESNPCIFYDMLKRMGATEISVEDVYSLSYFDDYINNKEIINMNHILGVDTYLGENNKTLDKENNVVDVIELYKNNICMEDKYNKLLKHHSYIYGIIFLFNIGKHYKNNKYIEHNVPDNLFFAKQVIPNACATQAILSIVLNKDIELNDEIKNIKTFSLNFDSSMKGLTLSNCTFLRNIHNSYKPPIYLDKEDVHHDKKKSEDSFHFVSYISFQDKVYLLDGLQSGPVLINADEQNKPNPNNNNNNKDNDNDNNNNNNNNNNNNNNNNNNNNNNNNNNIGMNGKDWIEISREHIKKEIDEICNSQTNNDVRFNIIAVMKDKEYIIQEYINIHRIVKQRVNIKLINLGENIELSDEINEDEFPLLNDIPSIENLPNNVDTLYNIVNKSTLEINYLQSLLHEQKEIKKLWNKELTFKFFNFYPFIMSSLNLMAKHKLLKDAYQKEKLKNATKS

SEQ ID NO: 76 - protein, 506 aa, Plasmodium vivax
MQRSSNEGLSEWCLIESNPCIFNDMLSRMGAKHLSVEDVYDLEFFDDYIYNRDVVSVEHVLSIELYKTEKEKEKEREEREEQKEREEREEQKEQNAADGSTGGGAPPKREMYRNTAETDEKYYRLIRNENSIFGIIFLFNIGKSYKRNKFVEHSVPENLFFAKQVIPNACATQAILSIVLNIGVELNEEIKNIKSFSNNFDSSMKGLTLSNCNFLRNIHNTYKPPIYIEKENLHDEKGKNNDSFHFVSYIQFGGSVYMLDGLQEGPVLIGQTGGADGRRSWVDLAREHIKKEIDEICGVSGGSGVSGGVGGSSGGRGGSGGGDGRFNILIVVKDKEYLLKEFYKIHRILYKRLFTKLRSLGVKEELLLDPVHDKINDQLSEEISAEMNGQVSGQANGQANGQANVQANGQVIEEKFNYANIPTVEELPDNIGELLTTFHKSQFEINYLQALLQEQKQLKRSSKKELAFKYFNFYPFVMSSLKLMAKHKFLKEAYQKQKQKRRRAIA

SEQ ID NO: 77 - DNA, 1257 bp, Plasmodium yoelii
atgcaaagtgaaaatgatagcattggggaatggtgcttaattgagagtaatccctgcatattttatgagatgttaaaacagatgggagcaaaaaatttatcagcagaagatgtatatgatttagatcattttgataattatataaataataaagatgaaataaaaattgaacatatattaagcatacaagaatacagaagtgaaaaagaaaaagaagcaggtttaaagtcaaaaatggaaacagaaccatataatagtgacatagatttagaagataaatataataagcttttaaataatttttctcatgtatttggaataatatttttatttaatattggaaaaagttatgatcgaaaaaaatataaagaacataatattcctgaaaatttattttttgctaaacaagtcattccgaatgcatgtgcaacacaagctatattatctattatatttaataaaaatataaaattaaatgaaaatatagaaaatataaaaacgtttagtataaattttgatagtactatgaaagggttaacattatctaattgtaattttttacgaaatattcataattcttttaaaacgccagtatatatagaaaatgatgatttatatcataacaaaaaaaaagaatcaaattcttttcattttgtatcatatattgaatttgaaaaaaatgtatatttattagatgggttacaagaaggcccaatattaattactgataaaaatgatgatgaaaaaaaagaaatagaaaataactggataaatatagcacgaaatcatataaaaaaagatataaacattatgagcaatagtgaagatgatacagaaaatcgatttaatattttggcaataataaaagataaggaatgtataattaatgaatatataaatatacatagaatatttaaacaaagaataagtgttaaactaataagtttaggagaaaatatagaattcgatgatgaaataaatgaagatgattattatttttctaataaaatacctagtattgatcaacttacatctaatattgaaaaattacataatattttaaaaaaatcatctaatgaaattaattttttagaaaatcttttgactaaagaaatagaacttaaagcttcttgggataaagaacgaacttttaaattttataatttttaccctttcataatatcttcaatcgatttaatggctaaacataaaatcttgaaaccgtcttacgaaaaagaaaaacaaaaacgaaataat

SEQ ID NO: 78 - DNA, 1395 bp, Plasmodium falciparum
atggcgagggataatgaaaacattttagaagagtggtgtttaatagaaagtaacccgtgtatattttatgatatgcttaaacgtatgggtgctacagaaatttcagtagaagatgtgtatagtttatcttattttgatgattatataaataataaggagattataaatatgaatcatatattgggtgttgatacatatttaggagaaaataataaaacgctggataaagagaataatgttgttgatgttatcgaattatataagaataatatatgtatggaagataaatataataaattattaaaacatcatagttatatttatggtataatatttttatttaatattggaaagcattataaaaataataaatatattgagcataatgttcctgataatttattttttgctaaacaagttataccaaatgcatgtgctacacaagctattttgtctattgtgttgaataaggatatagaattaaatgatgaaataaaaaatataaaaacatttagtttaaatttcgatagttcaatgaaaggattaacattatcaaattgtacttttcttcgtaatatacataattcatataaacctccaatatatttagataaagaggatgtacatcatgataaaaaaaaaagtgaagactcctttcattttgtttcctatattagttttcaggataaagtatatttattggatggtttacaaagtggccccgtgcttataaatgcagacgagcaaaataaacccaacccaaacaataacaacaataataaggataatgataatgataataataacaacaataacaataataataacaataacaacaataacaacaataacaacaataacaataataataacaatattgggatgaatggaaaagattggatagaaatttctagagaacatataaaaaaagaaatagatgaaatatgtaattcacaaactaataatgatgttcgttttaacattattgccgttatgaaagataaagaatacattattcaagaatatataaatatacatcgcatagttaaacaaagagttaatatcaaattaattaaccttggagaaaatattgaactatcagatgaaattaatgaagacgaatttcccttattaaacgatataccctcaatagaaaacctaccaaacaatgtagatactttatataatatagtaaataaatcaaccttagaaattaactatttacaatcattattacatgagcaaaaagaaataaaaaaattatggaataaagaactgacttttaaattttttaatttctatcctttcataatgtcttctcttaatttaatggctaagcataagttattaaaagatgcttatcaaaaagaaaaattaaaaaatgcaacaaaatct

SEQ ID NO: 79 - DNA, 1518 bp, Plasmodium vivax
atgcaacgaagcagcaacgagggcctgagcgaatggtgcctgatcgagagcaacccctgcatcttcaacgacatgctgagccggatgggcgcgaagcacctctccgtggaggacgtgtacgatttggagttcttcgacgactacatctataacagggatgtggtcagcgtggagcacgtcctcagcatcgagctgtacaaaacggagaaggagaaggagaaggagcgggaggagcgggaggagcagaaggagcgggaggagcgggaggagcagaaggagcagaatgccgctgatggaagcaccgggggaggggcgcccccgaaaagggagatgtaccgaaacacagccgaaacggacgaaaagtactaccggctcataagaaacgaaaacagcatttttggaattattttcctttttaacatcgggaagagctacaagaggaacaagttcgtggagcacagtgtgccagagaacctcttctttgcaaagcaggtgatcccgaacgcatgtgccacgcaagcaatcctgtctattgtcctaaatataggggtagaactgaacgaagaaataaaaaacatcaaatcgtttagcaataactttgatagctcgatgaaggggctcaccctctccaactgtaacttccttcgaaacatccacaatacgtataagcctcccatatatatagaaaaggagaacctgcatgacgaaaagggaaagaacaacgactccttccacttcgtttcgtatatacaatttggcgggagtgtctacatgctggacggcctgcaggaggggcccgtgctcatcgggcagaccgggggcgcggacggccgccgcagttgggtcgacctcgccagggagcacatcaagaaggagatcgacgagatatgcggggttagcggtggtagcggagttagcggcggtgtgggtggaagcagcggtggccgtggcggcagcggtgggggggacgggcggttcaacatcctaatcgtggtgaaggacaaggagtatttgctcaaagagttttataaaatccacagaattttgtataagagactcttcaccaagttacgcagcctgggggtgaaggaggaattattactggacccagtacacgataaaataaacgaccaactgagcgaagagataagcgcagaaatgaacggccaagtaagcggccaagcaaacggccaagcgaacggccaagcaaacgtccaagcgaacggccaagtaatcgaagaaaagtttaactacgcgaatatccccaccgtggaggagctcccagacaatatcggagagctgctgaccactttccataagtcccaatttgaaatcaactacctgcaggcccttttgcaggagcagaagcagttgaagcgctcctcgaagaaggagctggccttcaaatattttaatttctaccccttcgtgatgtcctctttgaagctcatggccaagcacaagttcttgaaggaggcctaccagaagcagaagcagaagcgcaggcgggccatcgcc

SEQ ID NO: 80 - protein, 21 aa, Plasmodium yoelii
SGWKFEEQEGDVNMVLTKNVD

SEQ ID NO: 81 - protein, 33 aa, Plasmodium yoelii
IIDFQLVSPFQAEGENEAQAEMTDFSVTVEKPN

SEQ ID NO: 82 - protein, 36 aa, Plasmodium yoelii
GGITFYCTTLQNDEKFRYMIGNVKYYKNEEGKNSVS

SEQ ID NO: 83 - protein, 47 aa, Plasmodium yoelii
YNGPEFEDLDDSLQTSLDEWLANLGVDSELCDFIDSCSIDKEQREYM

SEQ ID NO: 84 - protein, 252 aa, Plasmodium yoelii
MNFLRRNTVSLCKSHALNKTLNNSGNVFAKLSKRKFTDINSIAKCSQSAQTKFNFGDGRKYASSEAQKLSEVVKSEVQHEKSNYEAPENIKKFLQNSGWKFEEQEGDVNMVLTKNVDDMKVIIDFQLVSPFQAEGENEAQAEMTDFSVTVEKPNKQGGITFYCTTLQNDEKFRYMIGNVKYYKNEEGKNSVSSYNGPEFEDLDDSLQTSLDEWLANLGVDSELCDFIDSCSIDKEQREYMAWLQNISNFIES

SEQ ID NO: 85 - protein, 252 aa, Plasmodium falciparum
MNSLLRNTLNSSKGKIFTKYLNNSFNKVANLNSRKVSNFTKYGKCVQRVDKNFNTINKRSFSSSEAQKLSEVVKAEVQHEKSNYEAPDNIKKFLQTSGWKFEEQEGDVNMVLTKNVDGMKIIIDFQLVSPFQAEGENEAQAEMTDFSVTVEKPNQNGGITFYCTTLQNDEKFRYMIGNVKYYKNEEGKNSVSAYNGPEFEDLDDSLQTSLDEWLANLGVDSELCDFIDSCSIDKEQREYMSWLQNISNFIEA

SEQ ID NO: 86 - protein, 254 aa, Plasmodium vivax
MNFLRRNAANLCKGKVLGKHLNCSVHELTNLNKRKISNITDLGKCGQRYQATHSGSTIGAKRFASSEAQKLSEVVKAEVQHEKSNYEAPDNIKKFLQTSGWKFEEQEGDVNMVLTKNVDGMKIIIDFQLVSPFQAEGENEAQAEMTDFSVTVEKPNKQGGITFYCTTLQNDEKFRYMIGNVKYYKNEEGKNSVSAYNGPEFEDLDDSLQTSLDEWLANLGVDSELCDFIDSCSIDKEQREYMSWLQNISNFIES

SEQ ID NO: 87 - DNA, 756 bp, Plasmodium yoelii
atgaattttctacgtagaaacactgtgagcttatgtaaaagccatgctttaaataaaaccctgaacaattcaggaaatgtgtttgcaaaactaagtaaaagaaaatttacagatattaatagtattgcaaaatgtagccaaagtgctcaaaccaaatttaactttggtgatggaagaaaatatgcttcaagtgaagctcagaaattgtcagaagttgtgaaatcagaagttcaacatgaaaaatcaaattatgaagcacccgaaaatattaagaagtttttacaaaattccggatggaaatttgaagagcaagaaggagatgtaaatatggtattgacaaaaaatgtagacgatatgaaagtcattattgattttcagcttgtatctccatttcaagcggaaggagaaaatgaagctcaagctgaaatgactgatttttcagtaacagttgaaaagccaaataagcaaggaggtataactttttattgtactactcttcaaaatgacgaaaaatttagatatatgataggaaatgtcaaatattataaaaatgaagagggaaaaaactctgtatcatcttacaatggcccagaatttgaagatttggatgactctttacaaacatcacttgatgaatggttagcaaatttaggagtcgactcagaattgtgtgactttattgattcatgcagcattgataaagaacaaagagaatatatggcctggttacaaaacatttcaaattttattgaatcc

SEQ ID NO: 88 - DNA, 756 bp, Plasmodium falciparum
atgaattctcttttaagaaacactttaaattcttccaagggtaaaatttttaccaagtatttgaacaattcctttaataaggtagctaatttaaatagtagaaaggtttctaactttacaaagtatggaaaatgtgtacagagagttgacaaaaatttcaacacaattaacaagaggagcttttcttcgagtgaagcacaaaaattatcggaagttgtaaaagctgaagtacaacatgaaaagtccaattacgaagctccagataatataaagaagtttttacaaacttcaggatggaaatttgaagaacaagaaggagatgtaaatatggtattaaccaaaaatgttgatggaatgaaaattattattgactttcaacttgtttctccatttcaagcagaaggagaaaatgaagctcaagccgaaatgacagatttttctgtaactgttgaaaaaccaaatcaaaacggaggtataacattttattgtacaactttacaaaatgatgaaaaatttagatatatgataggaaatgtaaaatactataagaatgaagaaggaaaaaattctgtatcagcttataatggacccgaatttgaagacttagatgattctctacaaacatctcttgatgaatggttagctaatttaggagtagattcagaattatgtgatttcattgattcctgcagtatagacaaggaacaaagagaatatatgtcatggttacaaaatatttcaaattttattgaagct

SEQ ID NO: 89 - DNA, 762 bp, Plasmodium vivax
atgaatttcctgaggagaaacgctgcaaatttgtgtaaaggcaaagtcttggggaagcacctgaactgctctgtgcacgagctaaccaacctgaataagagaaagatttccaacataaccgaccttgggaaatgtgggcaaaggtaccaagcaacccattccggctctactattggagcaaaaagatttgcttcaagtgaagcgcagaaactgtccgaagttgtgaaagcagaggtgcaacatgagaagtcgaattatgaggcaccagataatattaagaagtttttgcaaacgtcggggtggaaatttgaggaacaagaaggagatgtcaacatggtgttaaccaaaaatgtggatggaatgaaaattattatcgattttcaacttgtgtctccatttcaagcagaaggagaaaatgaagcgcaagcagaaatgactgacttttctgttaccgttgaaaagccaaacaaacaaggaggcattaccttttattgcaccaccttacagaatgatgagaaattcagatatatgattggaaatgttaagtattataaaaatgaagaaggaaaaaattccgtgtcagcttataatggacccgaatttgaagacctggatgactccctacaaacttcgctcgatgaatggttggcgaacttgggagtagactccgagttgtgtgattttatcgattcctgtagcattgacaaagagcaaagagaatacatgtcatggttacagaacatttcgaattttatcgaatct

SEQ ID NO: 90 - protein, 174 aa, Plasmodium yoelii
MKNLSILTYTSIRSLTNLYISQMLSNKNWNEIKKTNQEIFNLNNVQDSKNCSNWNSISIDNETESFNKKEKNNETETVTDSFIKKEKQIANINTQIKDNLYNLENKQIYTIGDVSVITELCSSIIDLLTVIFLSKATHFIKHNLYFYIVLSSCHLFFSYKELQYLLASNNELNK

SEQ ID NO: 91 - protein, 381 aa, Plasmodium falciparum
MKFFVFHLLFILLSYNSFTYVLNKNIKTLSLSSNIYKKNLFCRKKNIRPLKIYVYPSFIKNIIKPLENAYFRNYFMYRSLARICVSLSSAFSLGAKLYLYKKNMNSLFLTQLLMNNEILIKILKICWLYKLSHFIDKNVKLCRYLSTVFYIISIYLDIFSTYNLANNIYIYYLFYSLSSILKSLSILTYTSIRSNINFQVYQMLTLQKKNYEKKYKISNTSHKNNTPIDRYSHSTSSTNVEHNNIHSNDNATTIHKNNILNESTQNGHNNIENIHLKNNVIHNTKDVHNNLDIHSEVENTDEDYKIYDNHIEKNKLSINTKNFCIGEISVIIDLLSTLVDLSTILFLFQATKFIKQNLCFYIFISALHLFFSYKEIQYLLI

SEQ ID NO: 92 - protein, 381 aa, Plasmodium falciparum
MKFFVFHLLFILLSYNSFTYVLNKNIKTLSLSSNIYKKNLFCRKKNIRPLKIYVYPSFIKNIIKPLENAYFRNYFMYRSLARICVSLSSAFSLGAKLYLYKKNMNSLFLTQLLMNNEILIKILKICWLYKLSHFIDKNVKLCRYLSTVFYIISIYLDIFSTYNLANNIYIYYLFYSLSSILKSLSILTYTSIRSNINFQVYQMLTLQKKNYEKKYKITNTSHKNNTPIDRYSHSTSSTNVEHNNIHSNDNATTIHKNNILNESTQNGHNNIENIHLKNNVIHNTKDVHNNLDIHSEVENTDEDYKIYDNHIEKNKLSINTKNFCIGEISVIIDLLSTLVDLSTILFLFQATKFIKQNLCFYIFISALHLFFSYKEIQYLLI

SEQ ID NO: 93 - protein, 396 aa, Plasmodium vivax
MAPFPHAEKCTHLLVALSSCFSFRSPRGASPNVGHLMCSPARKKGIIQRGPLTIRASHNFLSSITTPLLNENFKKYFAFRCLSRICVSLSSAFSLNAKIHLYRKNSNNLLLTQVLLYNEILVKVLKICWLYKLRSFVDSNIKMCRILSTVFYVTGIYLDLLSTLEIFKNSFFFPCALYVLSSTLKSLSIMTYASIRSATNLRLCEMLNGPGAGAPGVLHNHSNGNNNSSNSNNRTDRGEPTHDHLPTEEQTREDTDGAKPKGDDVAIRLGEDAHAPVLGAEQGGDTPLESLSNGTIPHSEHGNHCSSRSSRSSHSSHSSHSSHSSRASTPANGVKKTYYIGEVSVLTDLLASLVDLLTVVLLARTTKYIERKIFFYVILSALHLFFSYKELQCLLK

SEQ ID NO: 94 - DNA, 522 bp, Plasmodium yoelii
atgaaaaatttgagtatactaacatatacctcaataagatctttaacgaatttatatataagtcaaatgctctcaaataaaaactggaatgaaataaaaaaaactaatcaagaaatttttaatttaaataatgtccaagatagtaaaaattgttcaaattggaatagtataagcatcgataatgagactgaaagttttaataaaaaagaaaaaaataatgaaactgaaactgttactgattcatttataaaaaaagaaaaacagattgcaaatattaacacccaaattaaagacaatttatataatttagaaaataaacaaatatatactattggggatgttagtgttataacagaattatgttcttcgattattgatttgttaactgtaattttcttatcaaaagccacacattttataaagcataatttatatttctacattgttttatcatcttgtcatttatttttttcgtacaaagagttgcaatatttattagcttcaaacaatgaactaaataaa

SEQ ID NO: 95 - DNA, 1143 bp, Plasmodium falciparum
atgaaattttttgtatttcaccttttatttattttgttgtcatacaatagttttacttatgtgctgaataaaaatattaaaactctgagcttatcttcgaatatttataagaaaaatctcttttgtagaaaaaaaaatataagaccattaaaaatttatgtttatccaagttttataaaaaatataattaaacctttagaaaatgcatattttagaaattattttatgtatcgatccttagctcgaatatgtgtatcattaagtagtgcattttccttaggtgcaaaattatacttatataaaaaaaatatgaatagtctatttttaacacaattattgatgaataatgagatacttataaaaatattaaaaatatgttggttatacaaattaagtcattttatagataaaaatgtaaaattatgtagatatctctccaccgttttttatattattagtatatatctagatattttttcaacgtacaatctagcaaataatatatatatttattatttattttattctttatcctccatattaaaaagcttaagtatattaacatacacttctattagatcaaatattaattttcaagtctatcaaatgttaacattacaaaaaaaaaattatgaaaagaaatataaaataagcaatacttctcataaaaataatacgcctatcgatagatatagtcatagtacttctagtactaatgtagaacataataatattcattctaatgataatgcaaccaccatacataaaaataatatattaaatgaatctacgcaaaatgggcacaataatatagaaaatatccatttaaaaaataatgtaattcataacacgaaagatgtacacaacaatttagatattcatagtgaagttgaaaatacagatgaagattataaaatatatgataatcatattgaaaaaaataaattatctattaatacaaaaaatttttgtataggagaaataagtgttataattgatttattatccaccttggtagacttatctactatacttttcttgttccaagcaacaaaatttataaaacaaaatttgtgcttttatatctttatatcagcattgcatttattcttttcatataaagagatacaatatttgttaata

SEQ ID NO: 96 - DNA, 1143 bp, Plasmodium falciparum
atgaaattttttgtatttcaccttttatttattttgttgtcatacaatagttttacttatgtgctgaataaaaatattaaaactctgagcttatcttcgaatatttataagaaaaatctcttttgtagaaaaaaaaatataagaccattaaaaatttatgtttatccaagttttataaaaaatataattaaacctttagaaaatgcatattttagaaattattttatgtatcgatccttagctcgaatatgtgtatcattaagtagtgcattttccttaggtgcaaaattatacttatataaaaaaaatatgaatagtctatttttaacacaattattgatgaataatgagatacttataaaaatattaaaaatatgttggttatacaaattaagtcattttatagataaaaatgtaaaattatgtagatatctctccaccgttttttatattattagtatatatctagatattttttcaacgtacaatctagcaaataatatatatatttattatttattttattctttatcctccatattaaaaagcttaagtatattaacatacacttctattagatcaaatattaattttcaagtctatcaaatgttaacattacaaaaaaaaaattatgaaaagaaatataaaataaccaatacttctcataaaaataatacgcctatcgatagatatagtcatagtacttctagtactaatgtagaacataataatattcattctaatgataatgcaaccaccatacataaaaataatatattaaatgaatctacgcaaaatgggcacaataatatagaaaatatccatttaaaaaataatgtaattcataacacgaaagatgtacacaacaatttagatattcatagtgaagttgaaaatacagatgaagattataaaatatatgataatcatattgaaaaaaataaattatctattaatacaaaaaatttttgtataggagaaataagtgttataattgatttattatccaccttggtagacttatctactatacttttcttgttccaagcaacaaaatttataaaacaaaatttgtgcttttatatctttatatcagcattgcatttattcttttcatataaagagatacaatatttgttaata

SEQ ID NO: 97 - DNA, 1236 bp, Plasmodium vivax
atggcgccttttcctcacgcggagaagtgtacccatctccttgttgcactctcttcttgtttttccttccgctctcctcggggtgcttctccaaatgtgggtcacctcatgtgtagccccgctagaaaaaagggaataattcaaaggggtcccctgaccattcgcgcgtcccacaattttttaagcagcataactacacccctgttgaatgaaaactttaaaaagtacttcgccttccgatgcctgtcccgcatatgcgtatcgttaagtagcgccttctccttaaatgcaaaaatacatttgtataggaaaaatagtaacaacctgttgctgacccaagtcctcctctacaatgagattctcgtgaaggtgttgaagatctgttggctctacaagctcagatcctttgtggatagtaatataaaaatgtgtagaattctgtctaccgtcttttacgtcactggcatttacttggatttactttctactttggaaatttttaaaaattctttttttttcccctgcgccttgtacgtcctttcgtccacccttaagagtttaagcatcatgacgtatgcgtccatccggtccgccacgaaccttcgcctgtgcgaaatgttaaacgggccaggtgcgggtgcccccggggtgcttcacaatcatagcaatggtaataataatagtagtaatagtaataatcgaacggacaggggggaacccacacatgatcacctacccactgaggaacagacgcgggaagatacggatggggcaaagccgaagggggacgacgtggcaattcgcctgggggaagatgcgcacgcgcctgttcttggtgcagagcagggaggcgacacccctctggagagtttatcaaatgggacgatcccccacagtgaacatggcaaccattgcagcagtcgcagcagtcgcagcagtcatagcagtcatagcagtcatagcagtcatagcagtcgcgctagtacccccgccaacggtgtaaagaaaacgtactacattggcgaagtgagtgtcctcacggatttgctggcctccctcgtggacctcctcaccgttgtgcttctcgcacggacgaccaagtacatagagaggaaaattttcttttacgtcatcctgtccgctctgcatttgtttttctcctacaaggagttgcagtgcttgttgaaggctctgcatttgtttttctcctacaaggagttgcagtgcttgttgaag

SEQ ID NO: 98 - protein, 173 aa, Plasmodium yoelii
MNRQGKYDIFPPPLEKINNNNKTQVPKKCPEKTEKTEKTEKTEKTEYPFLVNDERSNIKHQSENKCFNKNDMVNEKINKVDPNILNKYNNLILNTNEINLIINDNANFKELLSNNQVSNFMNEYLTAPLEAIAKYKNDKTVINFLEILFKYMNAKQKHIHLNNISETFTFGTK

SEQ ID NO: 99 - protein, 158 aa, Plasmodium falciparum
MNKKNTTYDILPPPLEKIHKNVEKKDIIHNNNNIIIKEDNKCKIKNEDIKTNVNNTFDKNNIILNNNVADKYKNIILNINEINTILKDHPHFKQMVENENVTEFMDKYLINPIEAIMKYKSDQHVIEFLNTLFKYMNAKRNYIHINNLPQSFTFHKKK

SEQ ID NO: 100 - protein, 208 aa, Plasmodium vivax
MDGKKGPIYDILPPSLEKIKKTDRRRSQGEAKELPRNELALGPPQRGAQPLKMGPTPREGAKQMKQHTEETKQHTEQTKQHTEQTKQHTEQTKQHTEQTKQHTKHTGHTEQTERAANHVAQKYSNVILSSDEISAIISSNAHFKTLVESEKVSSFMGDYLENPLVAIKKHGKDETIAQFLDCLFRYMTQKSRSIHLANLPDNFTIPRR

SEQ ID NO: 101 - DNA, 519 bp, Plasmodium yoelii
atgaacaggcaaggtaaatatgacatttttcccccaccccttgaaaaaataaataataataataaaacccaagttcccaaaaagtgcccagaaaaaacagaaaaaacagaaaaaacagaaaaaacggaaaaaacggaatatcctttcttagtgaatgatgaacgaagtaatataaaacaccaaagtgaaaataaatgttttaacaaaaatgatatggttaatgaaaaaataaataaagttgaccctaacatactaaataaatataataacctaattttaaatactaacgaaataaatttaataataaatgacaatgcaaattttaaagaattattatctaacaatcaagtctcaaactttatgaacgaatatttaactgcccctcttgaagcaattgccaaatataaaaatgataaaactgttattaattttttggaaatattgtttaaatatatgaatgcaaaacaaaagcatatacatttaaataatatttccgaaacattcacttttggcacaaaa

SEQ ID NO: 102 - DNA, 519 bp, Plasmodium falciparum; identical to SEQ ID NO: 101

SEQ ID NO: 103 - DNA, 624 bp, Plasmodium vivax
atggacgggaagaagggccccatctacgacatcctccccccctcactggagaaaataaaaaaaacggacaggagaagaagccaaggtgaagcgaaggaactgccccgtaatgagttggcactgggacccccccaacggggtgcacagcccctcaaaatgggtcccacgccacgggaaggggccaaacaaatgaagcagcacacggaggaaacgaagcaacacacggagcaaacgaagcaacacacggagcaaacgaagcagcacacggagcaaacgaagcaacacacggagcaaacgaagcaacacacgaagcacacgggacacacggagcaaaccgagagggccgctaaccacgtggcccaaaagtacagcaacgtcatcttaagcagcgacgaaatcagcgccatcatcagcagcaacgcacacttcaaaacgctcgtcgaaagtgaaaaggtatcctcctttatgggggattatttggagaacccactcgtggccataaaaaaacacgggaaggacgaaacgattgctcaattcctcgactgcctcttccggtacatgacgcagaagagtcgcagcattcacttggccaacctgcccgacaactttaccatcccgcggagg

SEQ ID NO: 104 - protein, 20 aa, Plasmodium yoelii
  MISC_FEATURE (20)..(20): X is an asparagine (N) residue or a serine (S) residue
LLKHGWCEMLKGGVIMDVKX

SEQ ID NO: 105 - protein, 26 aa, Plasmodium yoelii
  MISC_FEATURE (9)..(9): X is a lysine (K) residue or a glutamic acid (E) residue
VEQAKIAEXAGAIGVMVLENIPSELR

SEQ ID NO: 106 - protein, 23 aa, Plasmodium yoelii
SINVLAKVRIGHFVEAQILEELK

SEQ ID NO: 107 - protein, 41 aa, Plasmodium yoelii
KHKFKTPFVCGCTNLGEALRRISEGASMIRTKGEAGTGNII

SEQ ID NO: 108 - protein, 29 aa, Plasmodium yoelii
ATPADAAMCMQLGMDGVFVGSGIFESENP

SEQ ID NO: 109 - protein, 40 aa, Plasmodium yoelii
  MISC_FEATURE (11)..(11): X is an isoleucine (I) residue or a valine (V) residue
LPVVNFAAGGXATPADAAMCMQLGMDGVFVGSGIFESENP

SEQ ID NO: 110 - protein, 20 aa, Plasmodium yoelii
LLKHGWCEMLKGGVIMDVKN

SEQ ID NO: 111 - protein, 20 aa, Plasmodium falciparum
LLKHGWCEMLKGGVIMDVKS

SEQ ID NO: 112 - protein, 26 aa, Plasmodium yoelii
VEQAKIAEKAGAIGVMVLENIPSELR

SEQ ID NO: 113 - protein, 26 aa, Plasmodium falciparum
VEQAKIAEEAGAIGVMVLENIPSELR

SEQ ID NO: 114 - protein, 40 aa, Plasmodium yoelii
LPVVNFAAGGIATPADAAMCMQLGMDGVFVGSGIFESENP

SEQ ID NO: 115 - protein, 40 aa, Plasmodium falciparum
LPVVNFAAGGVATPADAAMCMQLGMDGVFVGSGIFESENP

SEQ ID NO: 116 - protein, 297 aa, Plasmodium yoelii
MRDYTDNDSILLKHGWCEMLKGGVIMDVKNVEQAKIAEKAGAIGVMVLENIPSELRNTDGVARSVDPLKIEEIRKCISINVLAKVRIGHFVEAQILEELKVDMLDESEVLTMADEYNHINKHKFKTPFVCGCTNLGEALRRISEGASMIRTKGEAGTGNIIEAIKHIRTVNNEIKYLCSLDESEVYNFAKKLRAPIDLILLTRKLKRLPVVNFAAGGIATPADAAMCMQLGMDGVFVGSGIFESENPQKMASSIVMAVSNFNNPKILLNVSLGLGKAMHGNTKVSNKWKNKSEEDNS

SEQ ID NO: 117 - protein, 301 aa, Plasmodium falciparum
MENHKDDAVLLKHGWCEMLKGGVIMDVKSVEQAKIAEEAGAIGVMVLENIPSELRNKEGVARSVDPSKVEEIKKCVSINVLAKVRIGHFVEAQILEELKIDMIDESEVLTIADEMHHIDKHKFKTPFVCGCTNLGEALRRISEGASMIRTKGEAGTGNIIEAIKHIRTVNNEIKYLCSLSDSEVYHFAKKINAPIDLVLLTKKLKRLPVVNFAAGGVATPADAAMCMQLGMDGVFVGSGIFESENPRKMAASIVSAVSNFNNPKILLDVSMNLGKAMCGSTRVSDKWKNKNEEHTKFLTPQ

SEQ ID NO: 118 - protein, 302 aa, Plasmodium vivax
MENAKRMDDHKDNDSILLKHGWCEMLKGGVIMDVKNVEQAKIAEEAGAIGVMVLENIPSELRSKESVARSVDPSKVEEIKKSVSINVLAKVRIGHFVEAQILEELKVDMIDESEVLTMADENNHIDKHKFKTPFVCGCTNLGEALRRISEGASMIRTKGEAGTGNIIQAIKHVRTVRNEINYLCALSESEVYNYAKRISAPLDLLLLTRKLKKLPVVNFAAGGVATPADAAMCMQLGMDGVFVGSGIFESENPRRMATSIVAAVSNFNNPKILLNVSLNLGKAMCGSTTICEKWKNKNEELN

SEQ ID NO: 119 - DNA, 891 bp, Plasmodium yoelii
atgagagattacacagataatgattccattctacttaaacatggatggtgtgaaatgttaaaagggggagttataatggatgtaaaaaatgtagagcaagcaaaaatagctgaaaaagctggtgcaataggtgtaatggttttagaaaatattccatctgaacttcgaaatactgatggagtagctagaagtgtagacccattgaaaattgaagagataagaaaatgtatttctataaatgtgttagctaaagttagaataggtcattttgttgaagcacaaattttagaagagctcaaagttgatatgcttgacgaaagtgaagtattaactatggcagatgaatataaccatataaataaacataaatttaaaaccccatttgtatgtggatgtacaaatttaggagaagcattaagaagaatatcagaaggtgcttctatgataagaaccaaaggtgaagctggaactggaaatataattgaagctattaaacatataagaacagtaaataatgaaataaaatatttatgttcattagatgaaagtgaagtatataattttgctaaaaaacttagagcaccaattgatcttatattacttacgagaaaattaaaaagattaccagttgttaattttgctgctggaggaatagctacacctgcagatgctgctatgtgtatgcaattaggaatggatggtgtttttgtaggatcaggaatatttgaaagtgaaaatcctcaaaaaatggcttcatctatagttatggctgtttctaattttaacaaccccaaaatacttttaaatgttagtttagggttaggaaaagccatgcatggaaatacaaaggtatcaaataagtggaaaaataaaagtgaagaagataattca

SEQ ID NO: 120 - DNA, 903 bp, Plasmodium falciparum
atggaaaatcataaagatgatgcagttttattaaaacacggatggtgcgaaatgcttaaaggaggagttattatggatgtaaaaagtgtagaacaagcaaagatagctgaagaagctggagctattggtgtaatggttttagaaaacattccttctgagcttaggaataaggaaggtgttgcaagaagtgtagatccatcaaaagtagaagagataaagaaatgcgtttctattaatgttcttgctaaagttcgtattggtcattttgttgaagcacaaattttagaagagcttaaaattgatatgatagatgaaagcgaagtattaacaattgctgatgaaatgcatcatattgataagcataaatttaaaactccttttgtatgtgggtgtacaaatttaggagaagctctaagaagaatatctgaaggagcttctatgataagaactaaaggagaagctggtacaggtaatattatagaagctattaaacatataagaactgtaaataatgaaatcaaatatttatgttctttaagcgatagtgaagtctatcattttgctaaaaaaattaatgcacctatcgatcttgttttacttacaaaaaaattaaaaagattaccagttgttaattttgctgctggaggtgttgctactccagctgatgcagccatgtgtatgcaattaggaatggatggagtttttgtagggtcaggtattttcgaaagtgaaaacccaagaaaaatggcagcttcaatcgtttcagctgttagcaattttaataaccctaaaatacttttagatgttagtatgaatttaggaaaagccatgtgtggaagcacacgcgtttcggataaatggaaaaataaaaatgaagaacacaccaaatttttaacaccacaa

SEQ ID NO: 121 - DNA, 906 bp, Plasmodium vivax
atggaaaacgcgaaaagaatggacgaccacaaagataacgactccatcctgctgaagcacgggtggtgtgaaatgctgaaggggggagtcatcatggacgtgaagaatgtagagcaggccaaaatagcggaggaagctggcgccatcggtgtaatggtccttgagaatatcccctcggagcttcgaagcaaagaaagtgtggcgagaagtgtcgaccccagtaaagtggaagaaataaaaaaaagcgtctccattaatgtactagccaaagtacgcataggccattttgtagaggcacaaattctagaagaacttaaagttgatatgattgatgagagtgaagttctaacaatggctgatgagaacaaccatattgataagcataaatttaagacgccttttgtatgcggatgtaccaatttaggggaagctttgaggagaatttcagaaggagcttccatgataaggaccaagggagaagcaggaacgggaaatataatacaagctataaaacacgtaaggacagtaaggaacgaaattaactacctctgtgcgttgagcgaaagtgaagtttataattatgccaaaaggattagtgctcctttggatctcctcctactcacaagaaagttaaagaaattgcccgttgttaattttgctgctggaggagttgccaccccggcagatgccgccatgtgcatgcaactcggaatggatggcgtctttgtaggctccggaattttcgaaagtgagaaccccaggaggatggccacctccattgttgccgctgtgagcaactttaacaaccccaagatactcctgaacgtcagcctcaacttgggcaaggccatgtgcggcagcaccaccatatgcgagaagtggaagaacaagaatgaggagctgaat

SEQ ID NO: 122 - protein, 441 aa, Plasmodium yoelii
MNGELECDYSTYDLLFCPTTPWPCLSFDFIYDNQNKEDVISQSKINGKKFKENKLTYPIDITCVSGTQATDKESNNIYVIKWGNLNKLDLYLSSEDLSSDDEHIKNKKNIEKNNSDNNKASEDDSVIICKSIKHTHGCINRIKSSKKINSLVGAWCEDKKVYIYEIRDEIEGLNERIYNENIQKDPVYIFNKHSNEGFAIDWNPVYGAQLLTGDNDGNLFLWLPDNMAKWKHENLNSTSIKNNCNKYSIEDIQWIKKGNGLGHVFAICSSDKSIKIVDTRDIKSVSDENQMQNLVNREIGFKIDIPNAHSSDVNVITWNENFEFLLASGGDDSVVKIWDIRNTSKNVASLNFHKDSITSISWDSKDTYVLLTSSLDNSISVWDLSVESEGLEDSFAQYPDQLLFEHKNQNFITDAKFHPSYPGVIVSTSGECFNIFKPYNT

SEQ ID NO: 123 - protein, 484 aa, Plasmodium yoelii
MKIVKELSKKGKIKWRRFISSQSLQNYNSLKNVDEDNYNILSTYKNKSYLNLSICNNVIPKYVHDCLVNNLNKNATLNLEHLKIIEDRALAAFNLENKYWGCVFNTSSHTEYTNSMDEYFLLKLFKNFVNYQSKIMIITFTLLGKELQEKNNKEESRMDKNILDEFYNILYIKNNDKINYMEIKNQCEQFNPDLIYIDETNNPYNFNYEFITTLRNIKRKINNNVYNGKSGVEDKNNTLVITNISNKASFIIGNFISSPFSQADIVFSYLNENIRANNCYIIFYRKGFKNISTQGKLICYEYEDNLKKTYFQNNVNNIICSLSTSFKCIQNCEFKEYIYQINKNINILFLYLNKKYFNIHFDQNNNFLNTACSNSLFNIQEYHIFCKKLNIFFDIININKSTYVQKSFNIGTNYLTALGMEEHDMKYVSEFINQSILLYLYTKQKSANSNLTFLEYLESSFISSDILALSNDIHSFVSMFPSPS

SEQ ID NO: 124 - protein, 331 aa, Plasmodium yoelii
MGRKKRKINIELKPFCYYCDREFDDEKVLIQHQKAKHFKCSQCNRKLDVATGLVVHMMQVHKTNLKTVPNSLPKRNDPEIVIRGMNGVPTEIIEENLNKLKQKLGDKNIKRQQRVNWAQVTMAPTMEQFLQQAQMGNFYFPGFNSPHIQPTNNMILNNNIDLKKNMPYIPLYPPGSNSNAPIIQPPPIGANIYQNMLTQIPSQHSIGYPGNLSSQNINTSQKYPPNINFPTLPFLPKLPHNTFPSMDSNFMPQNICPPPVPPSAPPSGPPLLPPSAPLIPSAPPNLAQNKANNSTENIPDQTNEDKAEDMNPSKESPNSTSNNDNSKKDDK

SEQ ID NO: 125 - protein, 161 aa, Plasmodium yoelii
MSDHETYDNIDAGASQTYPVQAGAIKKNGHVMLKEHPCKVVDYSTSKTGKHGHAKAHIVGIDIFTGKKYEDICPTSHNMDVPVVKRTELQLIDITEDGFVSLLFDNGDTKDDLSLPKDSEGNFDDVAKQIRNLFDSGKSVLVSVLSACGQEKIIAAKEMSS

SEQ ID NO: 126 - protein, 559 aa, Plasmodium yoelii
MINKEEAQRLKELGNKCFQEGKFEDSVKYFSDAIKNDPSDHVLYSNLSGAYSSLGRFYEALESANKCINIKNDWPKGYIRKACAEHGLRQLDNSEKTYLEGLKLDPNNKSLKDGLEKVRKDKEMENMEYINHINNIINNDAKLKSYKEENSNYPIELLNTIKAINANPMNIRFILSSCNPKISEGVEKFFGIKFNDEASYEAERERQRKKEEEEKKEKERKMKEEEKKKNRTPEEILGEEHKLKGNDFYKQKKFEEALKEYDEAIKVNPNDIMYYYNKAAVYLEMKSYEKCIETCIYAIENRYNFKAEFSQVAKVYNRLAIGYINIKNYDKAIEAYRKSLVEDNNRATRNALKELERKKEKEEREAYIDPVKAEEHKNKGNEFFKNNDFPNAKKEYDEAIRRNPNDAKLYSNRAAALTKLIEYPSALEDVMKAIELDPKFVKAYSRKGNLHFFMKDYYKAIQAYNKGLELDPNNKECIEGYQRCVYKIDEMSKSEKVDEEQIKKSMADPEIQQIISDPQFQIILQKINENPNSISEYIKDPKIFNGLQKLIAAGILTVR

SEQ ID NO: 127 - protein, 941 aa, Plasmodium yoelii
MSSMFNENELSGIDAHSVFGNNNNNERENYENKRKRFNENSNISVNQRTEDEEDEEDDEEDEEPSHVQDENMAKVFEKFLKTFSEKKNGKTDGDSDDDNDSVWRDNLNFDFPTELEIGNNAHYVQILYTILQNSFSRNKVLVVDMKHVLMWEPTDRNRFDIGSQLYMYIKRHFLRILDIFEQKVQILAESINPIKTKEVGKICLRFYNKKNPIHSLRSLRCEMLGEMISVRGQVTRTSDVRPELTLASFKCNECGNIINGVKQQFRYTQPNKCPSASCSNMHDWSLVLEQSYFVDWQKIRLQEIAQESPPGSMPRNMDVILRNDIVDSVHAGDRIIVTGCLIVVPDIPTLMKPGDIPRSVARQMLKKNENSLVSQGLTGIKGVGVQDLNHKLCIYACQIEKLNSSKKDSSFDEETQVDINCEEILNCDDLKWLREIAMHPNTIDILAECIAPKIWGNIEIKKGALLMMTGGVQKITSNCKLRGDINMCIVGDPGTAKSEILKYVESFAPRAIFTSGKGSTAAGLTAAVHRDPDQGDTVLEAGALMYADQGICCIDEFDKMDEKDRVAIHEAMEQQTISITKAGIQATLNARASVLAACNPKYGRYDSLKTFAQNVNIPAPLLSRFDLFYTMLDSIDIDKDTNIANHLVSMHCGEEAEKHLKANAGKLDNVKLEIYLELSKRVKPLLTDEAKYKLIHYYVSFRNIEYSPGAQRSMRMTVRQLESLIRLSEAVAKLKFSHFVDVKHVEIACSIFKASMKKISNEKEINLDEEPEKIGNVSTSMGNENNGINNGDNQTDKNIEVKKTTVIKASEYQCISAIIFEIIKEYEFNNNNECMTQDQLIESYLKDYAKAESTEHLDEWIHKLKKIISRLINQDMKLLSETNENDPENIILRIHPNYAGPSTEGIVSNKNMYGYNTFKNYQADQNVPDDDVDFQDDIENF

SEQ ID NO: 128 - protein, 532 aa, Plasmodium yoelii
MNLDLKTNKNKQIVVSFISGCNYNNLYNRENKKSLKIAKDDTKINSLKNDKYSEHVNIDEKYDKNDYINKLYENEFYDSTNYNVYIENNKLAEYISDVSINKNEICTLYEDMNLGRLFENLVAKLYYNKKINGFVHLYNGQEAISTGIIKNLRNSDFVVSTYRDHVHAISKNVPVKEILNELYGNYYGSTNQGKGGSMHIYNKKNNFIGGFGFIGEQIPISVGLAYSVLYKKEFIQDTSNKEYETCSEKQNTLMNHVNDVKENLTKHDENEHDKNENDLDVVVCFLGDGTSNIGQFFESLNLASTYNLPIIFVIENNNWAIGMESSRSSLGDLTNNYNKGKAFNITTYKVDGNDVLSIYKLAKKKINEIRKKKSGPILIEAITYRTRGHSLADPDLLRRLDEKTSWKKIDPIIQLTNYMKNNNIVDSIYFENTKKEIQKILLDAQNDADSNFEKSKNIDVCKLYDNNIFAPSEITKYQPSYSKYKKYDQLSPNELIQYYQSYMNEINGKFIKNDKNYYSQIFDKKQLPLIIN

SEQ ID NO: 129 - protein, 439 aa, Plasmodium yoelii
MNAMKNIECIILYAQNKFILQNIDQNNYNVEFDKIMENINNIKNVINNRNNTMNDDIVNCINDTKKIYKSNDKYNLFILDDYMLYNISKENTSIQPNIENNLEQFIINGFNFMGKGIIIKDYNNNANIIDLAKYNNYNSIFNNMNVNKFKNKYIALKILRKIIKKYKDNGYVAKFDIKIILTHIEYPLTLYFIYLYNKFREYTNYINIKLNDQKNGCITNVENEINICFYTLNDIVMNLYILLKNFYNINTIDLPEYYEDNFDIFFNIFYNFITYDIDVLRNYFLHLSITRNYKFGQNDSTKYITNIQNVGGNSNLLNLNGSDLANKLTSNNYMEKLINNFQQNMIKCKIITIDIIKIISERYQDESKTYILKMIYSLIDILYKEKDKTLLCHNYNCLSSTIKLIYHMHLEKSDLNPYIQVKFIEKIIETGSSTYKIKI

SEQ ID NO: 130 - protein, 958 aa, Plasmodium yoelii
MNDPNLKNMYALDEYKNGNFQIMSNLDHIEKRDFDINNVMLKGDTHGDGKVGSNNNSDETANNINNNSLENRDNASNMKGNKLSIYNLLVNAFNGGKKNTKSSGKEKRNNPTTVLGDESGINASSANNTSLNSNIDLRESINKDNKYIDHQSSMNMRNSENSDTLDISNNNASLLSHLKSGSGMDNSSISTHNIREGNMKGVNSKSGNNVTNSGNKMNKIEMMNSGKLGNENQRNKSNSPSHSHDSRNNSSLIMNHVNNKKYNIHKNDIDGKLSIDMLNNSEMELNNLLGTLPKNLNDNLSLYLENKRNNSSGMLPNESGISHFNQKFGKLEDDDNNNNNNSNGGQVVMINKEEHQRFVSLKSMLDTYRADVLNTCLLLEELILNQAMCKYIPTELYNKILKCYERLDMMLTDINNSNGDMGMKRTKDLNSLRSIGNLETMDYMNLNNMNINNVNLNDMDIKMDENMLYEDFKSYWDMAFSKNKIASQLSTKDLINNNQKNVLNPSQHQDFHINDVNNSNNNVLNKNGTINNKNNIHINQLFYDQGHGNKISNNNNHPIGNGGLNSSIKSSIGIMNTSRGSTNMIGNNNISLSEMSNNNNLGNSQMKSQKKKDSSNIMDTIISDNMNNSIGGCIGNSKSKKNSNDNMNDENNNHLNENMVLNYNNLKNSSIMNKKKFISNMNNNGGNNIDLVNFINSANNTIMKGNGMIGNNAAINSSILNGNNNVNMMNAKNSNTNYPADINSKLAKELNNYNSMNKERNMNHIEESDIKAVNKLLMLNNNNFPNLKVNNNNNDNILSDYSTNNATNNIMLNAETFFKKLNLYNDDHNNNVNNKNEGIGCDSNLLSLININRNSKSSYNVNQKGDNTNLQACNSHSEYDNEPRDNNNFKKQLNNENHLYNMQNKNMRNDINLKYLEEINSQFNFLPRNIRKENTEHNLMNILNFQNNLENKMQKQID

SEQ ID NO: 131 - protein, 458 aa, Plasmodium yoelii
MNALKKELKCMMMGRRNLGHSILKRGTNLSYKNIRSCQFFVEKKYLSIHEYLSIDLLRNNNIPCPQGFHAQTPEEAEEKALELQNICGDIDLVIKAQILSGGRGLGYFKENKFEGGVHICRNSMEIKDVASKMLNNTLVTKQTGPDGKKCNTVFICERFYIRKERYVAFLLDRNSDSICLLGSSVGGSSIEDISKKTPEAIYKININIKDGLTDGQSREFCEQIGFKGNELDMATDMVVNLYKIFKKYDCTLLEINPLSETNDGRVLCCDAKLNFDDNAEYRQKEIFEKRDLTQENPEELEAKKYNLNYVSLDGNIACMVNGAGLAMATLDLIVLHKGSPSNFLDVGGSATETEIAEALKIIDNNDKAKVCFINILGGIMRCDIIARGIINAAKQIKFKKPLIIRLEGTNEKEAIKIIEESKIKCIICQDMNLAAEKAVALAEIIEIAKRSNINIIVS

SEQ ID NO: 132 - protein, 568 aa, Plasmodium yoelii
MNPVQAENNAVEERIVSFEEEVETFLINLHDFVYHRNAEAIKKLFDTDFYTISDLYFKNIRWPSIKLVDLFYKQKNRYHNLIHSLYEELYYRHVFIINDVTLEDRKNTWENYKCLLNFISSICTDNDGNDNVLVMPNVWIYDFLSEYIYQFQSMCHFKIELLNFPEENTKGIEFVVNNPDVFESNIVLEVLHSLLLKGEFTTLPEDEKITYVNNIFNINNEELTSKYQFSYFSCCILLNVYVLLGDYYSALKIISNIQLNHKQLYWKVILCHINIYYNIAFCYMMLKRYNDSIKILSQILIYLSKQKAHISNQQKYQQSLINKLIDKMYLIAIICHSLCNTRLDETILQNIKENYSSKFYSLQSANEQAYTDLFYRVAPKFIDPVSNISFQLLTNFENTQNQPYNSNPTLRQLSIFLKNVTYQKKTYHLMSYVKLYHNIQINKLGNLMNYQEEDNDNVYCDIMCVKNYNRQLIWKEGPLYSGEITTSIFGNTFDFYIDIDILNIKTRAQQKFFIDYFIHQIGMCKNLTNNLHGNNSGHLYKIKYDNYKRKNKGKNRNKHANHQIPVMQ

SEQ ID NO: 133 - protein, 210 aa, Plasmodium yoelii
MKSNSKDSENKKVENLVLDDNDENTIIPYYLSNLLTNPSNPVVFMDINLGNNFLGKFKFELFQNIVPKTSENFRQFCTGEYKVNNLPVGYKNTIFHRVIKEFMIQGGDFINHNGSGSLSIYGEKFDDENFDIKHDKEGLLSMANSGPNTNGCQFFITTKKCEWLDGKNVVFGRIIDNDSLLLLKKIENVSVTPYIYKPKIPINVVECGEL

SEQ ID NO: 134 - protein, 317 aa, Plasmodium yoelii
MKNSWRHKALALPFLLLSSVLCNKTFFVDILNGINIKYNNKVPINKNVSNCYGQNNTKNDNRYSSMKQHFFIQNTAQPTIISETCDIENNNRNANILKQYIYTLSHLTIFDIDKETDIELNISLLLKACIASYNYIKNIEIYTSNVKNKEMCSFIYENRQDFEEYFNLQVLMYEKMFNPNENIEELLKSHIKDENIYKNDLKIYKQIKNNNIELKKDILEDILFESIRLNKMIQYSLTVNKFNLFSNPILFKLFLHFKTNGIYYDILLNIINKIKYYYSIKNINEEYKNKIFKIVDSYIAILNSIDDVYKKHDGNIL

SEQ ID NO: 135 - protein, 231 aa, Plasmodium yoelii
MSTPSIMVENENISQDKSEIVSKLVENKNTVCSWCFDILKNKLEKNKFNYIPPIIKDLHEKGFKIAFFVKWMKLNDIKDLGSYEYNAYDLKGCIGCLSQIDLTELQYYALESSLNDTRFNPITLKDLPYLIVTITYLFNFEKCEHVYDWVIGKHGIKINFTINNKRYSSTFLPDVATEHNFDHETTITHLIRKANYRGTINDQLLNIIQTERYQGVNCSLTYTDYEKIKQG

SEQ ID NO: 136 - protein, 619 aa, Plasmodium yoelii
MKISDVINDYKSLESNKLKNSDISSKKINNDSILEEFEIKNKIRKVCLGIPTKDLEVKNILRLLKEPICLFAEDNYDKRNRLKHILVTRYDKLIIKNKGENIEEVEEFKNILKKYYIDFSKIYDTTSPEYQKVNELEDELRNKGIKKDDATTKSGISDNILKEKFYTESTEELKLSRIDITLKTLPRIYLYKEMINNFQNKYSREQYENYISSYNEHIKSELDLYISQLGDSRPLTMGKFSPDNSVFAVSSYNTYINIFNFKNDNYNLVKTLKNGHVDKINCVEWNYPNNYSYYTTTNYTDINKNDLLLASCSSDKTFCIWKPFLHETNDGNNSSENYSNLSNKSDTNDNNDGKKGGKKKIEKNEKKNNSQEDANENDENGSEDINDNNNNVDNKEPLLCKIKAHDDRINKICFHPLNKFVLTCSEDETIKFFDIETQNELFYQEGHNSNVYSVTFNPYGNLYLSGDSKGGLMLWDIRTGRNIERKHMIHNNCIMNISFNPFMPNMFCTCSSDNTIKIFDLRKFQVSCNILAHNKIVTDAIFEPTYGRYIVSSSFDTYIKIWDTVNFYCTKILCNNDNKVRNVDISPDGNLISCTSFDRTWKLYKIEEFEKENIMSHFF

SEQ ID NO: 137 - protein, 1623 aa, Plasmodium yoelii
MICGKDVRLKNDDNEKKNKTQFKSNETNSYYSIDQNTISDGESPNICYVNKSDTTNLHINNLINNIIKCNNKFTKYNRIILSLKKINERIKCSNKCILNSCSEQQKDTKKKRKKNILQIKQRKNKKILFTNSCRISTKKKKKCNPKYELTEIIWKHKINKKIHQIIKRVIYITYCTNIGHYKKRNIRNNSFIYFLWNPHTLKQRNQEIKKQKKTTKLISSTNFTIINELKYNRGKQKYLNVERLNMVTDSKKGNQYNSKGEQNDKILYANKKGTNLMEEYGAEVEDKQNDEKQKCSETNYIYNSLEKQSENTYDLYKGLCKNSTYSGYPYGFKNSENKLAKRNKKKKSLISNIFNRIDDISDISGNNNDVILSSIKKNSKNFGKCNSEDNGNRIPMNEKHSNFCCNDNKSNNLKNYVYKDNVLKTSDHTYTCLSKFSNNKCTSNNIYFDKKLYFNKYNNTNNTDNLFDSKNVRNYSHSLRNIIKRDEHNDKKNNKLKNCIFSKINADNNNQFFLHKIDVLSDIHIHDKNNHSNCDHNGRKNWKSKKFNYFPMCLSIETDPINGYKHQYTKDSYIIKRTYSIDRKYNVRDYFRMSYIHNNYNSYKNRGNSTNYFSQNINCGNIESGQADRYFSRKKLIPNFLNKNKHNNDKKEIKYKNNVEKNVAFYYNSHYANKHNVNFLSYQNNNIYNKKLRNSMEDRGYSTNNSSSNATINEINHNNSASTRASNTNSSNNYTNGYTSVQPFKRLKNRVNNHFSALKRSYKNYQKNFEEEKIIFFNSIRNIIRIIKEIKKLKVDLKKEKKYCSVICDEKKREEFNNLIKYLLHQKIIRKKLKEYYFKKIDKGLFTFLLRSNYANFLFSEEEVKLLKRWNVIKKKRSKFDNDNNANHEENKAYDKNNKFQANDNLAYCYTDILNIQSPDQTNNFFGSEKERKTCYQEVPKNEKVLENNILNSEERKSYQNNYNRINQSYGNNNEFRFYTTNGFNHNTIEEYYKGNYLKQICINNLNDLYLKHCKKYKRSIIFNVLSFFKNIKIKNVSKKFKKKLKNNQHIYLSKIYNYKKMLRHIKYIFIKLLKKNIADINSIHINNCFLNSTICFFLFLILTIFKNISTLKVVQCHIYYSQFYISLYHIKNNNLKNLYFMCNHIIHCEIPDKDIYDYKYYKNCIIYFDLNYLKKKSKNNNKQGNKKHVEDIARSESIIYPLGQLENYQIDKIQTDHESNTKPHYGINKIIIKKNKKVIPFDKISFYDIFVAKKKNLNKETANDEHVTIKLSNLPNKEHKNNIISSNIEGKQKDILCWYDSISTAPPLLNTGEEDQNEEENNMNHIHTEIEKRENKYICDDTKFDSKINTYNIHSSSCSNENSSGNSVQASENYIYAFPRKGIEYFNLEKLRVLRLSSNKLGDDALIYLSSLIKKKKLNKLKILDLRWNNFTYKSLLSLLFALINNVKNDYKNNTISDLKKNKQTNKLKLRKLLLSGNNIDSSLYSSFLSGFCTCNYIVVVELDFSMNIIDNECFPITLKYFKHILNLQKRKKKNNNISGVYINLDHNSLKNSTYINKLMKILFKFPRNKKKYIKNKNMEQTNFIDQTGMVKQNILLSLQYNDIKNIDTNVEFHKYEQRIRF

SEQ ID NO: 138 - protein, 256 aa, Plasmodium yoelii
MRIFQIFQFEATSDMSSNIDSSFFSVGEIPNELQSSFDDISDYILVDESDLKRERLENTGSESNDTVATKDGTGKRGTHAQILKELKSSSFSEASKASSDQTNNNDNKKNGLCRTLGTEGRKRMLKLLRKAYKYNEECKVIMKNKNPPLSISYLPYFNLSMLWQLAEDFGVYNEALKIHRECIKKRTTNVRFKGNKNSGNYNIQDIAKNSKASKNEYMSDYLSSNVDTQGGEFYDSMNTTLQDDVQGKRKRKKNTF

SEQ ID NO: 139 - protein, 379 aa, Plasmodium yoelii
MIQRKLYFTLVILAVLSTIQIDTKWNKYVNAWFGRGEPEDDDYNHTKLYKVLEVDKYATTEEIKKAYRKLSKIYHPDKAKDKNSNTRFNEIAEAYEILGDEEKRRMYDNYGLNAAKNVESNKMDDDPSDHFNIYESFFGGGFRREEVKKAESLILPIELSLEQLYKGDIFSIYYTRDVKCLRSDDCIMKKKECSGKGYRTVTQQVAPGFIMQNKIRDDNCIDRGKAWDSKCSYCPNGLIEEKSIELTLEIEPGTKNNDKILFEKKGKQQIGHENGDLIFLVQTKNHKIYERKNNDLHQTYQISLKDALIGFSKDIHHISGTPIRITKNTVTFHNEVLKIQNKGMPIKNSSQYGNLYIKFMVQFPDKLTEKQKEAIVDLF

SEQ ID NO: 140 - protein, 296 aa, Plasmodium yoelii
MNSAAIEVITKLKKDDESNNKCFDCGTPNPDWVSVNHGIFLCINCSGVHRSLGVHISVVRSIKMDIFTDEQLKYMDKGGNKKFQTYLENYGINDFIPERKYRTKAADHYRQIIRSIVNNSNPPSPLPLDEGKHIINYGINENVNYSDNKNSNSNINNDQNFVNSINTTEILENVSATFSSLINKAQTMTTNTINNLNKNDIIETTKDTLINSGSWITEKTKQIAENVSENPWWEKGQSKIKDATQNASGWISSISSTVSRTNSSLFFSNNDNMNNNNESKPAPNTSNINGNSTNEA

SEQ ID NO: 141 - protein, 773 aa, Plasmodium yoelii
MKELLEDLFKIIELDEETESYLKERINDEKKKIVKNGVDYFYDLICPFSDKKLKKNVIAEIYKKHVNDVIKVTNENKNDNNNEKLTKSLNLKEYWEKNDVIGYYDPFLGIQEKQVNYNTSIPLSESIKINKEKQKQKEKQLSLFKEWVKNKIKIPSPVRVHNLLHCSDSNKSKTKIEKMNDIRIENFNLSIGQRNLLNDTTLKINVMNKYGLIGKNGIGKSTLLAKLARHEIENIKEDISIACIEQDLFLEDVTVLECVLMVDKIRHNLLKELEELELAKKQNDTKNSNDTKCDNLKDDTDEKIINIYEKLNSINYLEAEKEASKILCGLGFDSNLQKKKVNSLSGGMRMRLCLSRILFSNNDIILLDEPTNHLDIYTIQFLIDYIQKLNKTCIIVSHDRNFLNEVCTDIIHFHQKQLTYYSGNYDQFEKTRVEHLLQQQREHDSIELKKKHVQKFIDRFRYNSKRATLVQSRIKLLNKLPVVNLEKDETPFKFSFLEPFYVSSVLIRLRDVSFKNEMFKNLQIKKNANIIIADDFEDSNAKPIELSNDDENKKDTLTNNITGDYQFKHEFLFKNANFEVDMDSRIAICGVNGSGKTTLIKIILNLIDVFDGELYVSNKANIGYYSQYHVDSLNPVFNSIQQLQYNYSHKNIKEDEAIKYFNKFNIPTNILYEPIYVLSGGQKSKLALAILAYKNPNVLILDEPSNHLDIESVQALIVALSLYKGGIVLISHDTYLIKHVADEIYHINNITKEVVKIDYEFEKYTKLLLENKI

SEQ ID NO: 142 - protein, 327 aa, Plasmodium yoelii
MKRKYLCGHNRPLTHVNTNCDGDLLFTTGRDKKFILWNLADGNQIGLYECSGAVYNSDVTFDSKRVVCSSAANKIYIFDVYTGETLKVIDESGPVRFVEFNRDPLNQNRVIAAIDRLKADHKRFIKLYDLKSDTLIWKQEHESRCIQVRWCFFDKLILSAHENGEIVIWNSEDGHQIRKFQAHTKEVTNLSFDKDRMIMLSSSTDGTAILRDAVNFDIINEYKTDRPLNTCDISPLFRSENNPKNHIILAGGQAAEHVTTTATGEGKFQTLLYDIIHANELGSIKGHFGTVHSIKFLPHGDGFVSGGEDGFARIYHFDQDYFIGKYD

SEQ ID NO: 143 - protein, 207 aa, Plasmodium yoelii
MNENRSRDYDYLYKIILIGDSGVGKSCILLRFSDDHFTESYITTIGVDFRFRTLKVDDKVVKLQIWDTAGQERFRTITSAYYRGADGIIIIYDTTDRNSFLHINDWMAEINKYTNDDTCKLLVGNKFDCKDEIEVPTAEGESKAKELNIPFIETSAKDSLNVELAFTMITQELIKKKKKKNINSVNNNQTKVNLSSDDRDQSSLCSC

SEQ ID NO: 144 - protein, 170 aa, Plasmodium yoelii
MSRAKVFFDISIDNKNAGRIVFELFNDITPRTCENFKSLCVGDKVGSRGKNLHYKNSIFHRIIPQFMCQGGDITNGNGSGGESIYGRSFTDENFKMKHDTPGLLSMANAGPNTNSSQFFITLVPCPWLDGKHVVFGKVIEGMNVVRDMEREGSNSGYVKRPVVITNCGEL

SEQ ID NO: 145 - protein, 194 aa, Plasmodium yoelii
MVSAKSKILKSNPSDLEREIAQCLVDIELSASSDIKNETKEIKILSCDLIEVEKIKKKTILIYIPYKIYATYVRKIQRKLINELEKKTKKYVVLVAKRTILKSRQKTKSFKILPRSRTLTSVYDSVLEDIVSPSEIIGKRISMKADGKRVFKIMLDPKERQRDNIDEKLISFAAVYKKITKRDTIFSLPPSNEK

SEQ ID NO: 146 - protein, 309 aa, Plasmodium yoelii
MAEHLARIIGTEEDRVNCPFFWKIGACRHGDQCSRSHYKPNSAQTLVIRHMYDNPPMAVAIAEGQMVDDEVLDQAADHFEEFYEEVFDELMKYGEIEDMVVCDNIGDHIIGNVYIKYTHEDYAEKAVKELNGRFYAGKPLQIEYTPVTDFREARCRQFVDGQCRRGGYCNFMHIKHVPRTVKRRLHKRMYKKFPMYKKNKKSRDDSDGDHRYDRYRDRNNRDKNKRDKYGNNYNSSRRRHRSQSSNGQDDDNQRSHKYPKRENSLERREKIERWNKEREMKNSQKNNNENEDTTKVENHGDGDDDNTKE

SEQ ID NO: 147 - protein, 811 aa, Plasmodium yoelii
MSTGLSRLLEIGIFVGSFVLIWYLTGEKLFKKKRRIVKDNILLILRHLCFEIYKVLNESSKTTKQVYDMIKSDPNAAIDVSKLEEAILNQGYKKKIEDVEKQVLDKFNVTADDFYDELKNYDKDVDIQKSLNSIKKMYNESLLGFTPKLPSIDENISKDVIINLTNLIYKEKRKIYKAKIDSMIKQNEDFDADVTFSDPEFFDKLQKSTEHVEEQIINENSDLIPNLFTFKYLVNYYSNDITFVQKKKYLESKHGEKMIKILKIKKNKKQKKKSNKDYNSSVHTQSQISLPDHLNSDKNESSKSLNIIHDYDNKNKNIFDTNVEPTNFPDQISVEIKQNEHDINFETTKKGWGRSLNEIKPDNDQSVSFSSIPEEYINNIDDFSVNKEIDQDPQDSDITTNDNALEPKIIDSEENPEQSEKPHESDAPSEADVEVEAAVEVEAPVEAEAPVEAEAPVEAEAPVEVEGPVEVEGPVEAEVPVEAEVPVEAESPVEDEVPVESEVVVEAEAPVETEVPAESEVAVEVETESPAEAEVPIEAESPMEAESPVEVEAAVEVEVPVEAEVAVETEAPIESEAVIESEVPIEAESPVEVEAPVEAESPVEAESPVEAESPVEAESPVEAESPVEVEAPVEAESPVEVEAPVEDESPVEVEAPVEDESPVEVEAPVEDEIPVEVEAPIEVEAPVEAEAPVEVESPVEAESPVEAESPVEAESPVEAESPVEAESPVEAPVESEVPVEAAEAEDGKKTANDGEAASVENSEGNDKHSNGGQEVETATNSETGTENSYETKGSEAKKKKKSFRFLKKNKK

SEQ ID NO: 148 - protein, 111 aa, Plasmodium yoelii
MAMKYVAAYLMCVLGGNENPGKNEIKNVLSAVNAEVEEEVLGNLLDSLKGKSYHELISEGLKKLQNVGGGGAAAAAAPVAGDAGDSKKEEKKEEKEEEEEEEEDLGFSLFG

SEQ ID NO: 149 - protein, 491 aa, Plasmodium falciparum
MNEELEVDENAYDMLFSPLTPWPCLSFDYILEHPKHDALSEEEKKRRKENIDSGILNYPLEVCCVAGTQANKRELNQIYVIKWSNLNKLKNVDDEEGSSDNSEDNDSSDFDVDIDEENDDTINGNINNGIEKKEENNVNNKLNNNNNNNSKHKKNDKLKEKLQKNEDTHTHKKSSVICKAIKHKYGSINRTKICKKINSLVATWCDDSNIYIYDISDEIKNLEVRPYNEQIEKKPLHVFEKHTTEGFSLDWNPVHAAQLLTGDNNGNIYLWLPNNSGKWNYELLNLKNMYTTNDNNNNNNKYNQNKQQCSIEDIQWCKKGNGLGNVFAMCSCDKSISILDIRNKNANSTNKNIHIENAHTNDVNVIAWNENTEFLLASGGDDNIIKVWDIRNTNNAVAQLIFHKQPISSISWNFKDTYVLLASSLDNSISIWDLSVETESLEFTDSKYPDQLLFEHLNQKFITDAKFHPHYPGLVVSTSSENFNIFKPCNI

SEQ ID NO: 150 - protein, 462 aa, Plasmodium falciparum
MLKEFVKNVNVRNHRYISFYSLRNQSRLNDIDDETYNMLKSYKNKNDINLSLVHNIMPTYMKEYLSIDLNRNIFVNNKNIENLEYIALNSFNLQKKYWGCLISNVSLNNNKSIDDYFFIKLYGHFLKKECKILRINYCLEQNIENNVSNDIMQNLYNIINIKNRNEPNYDEIQKISNDFNPDIIYFDESNNPYNIDYDRFIKGLKNKNNKIHNKPIIITNMNNKANLISQNLINSPFTHSDIVFTYFNENFRAHNSFVIFYKKGYKCVNTDGHIIEYDYEKKLKYAFDDIYLNNIFFSFFTSFKLMKNEEFKEYVKQIKENTYILYKYINRKYFHIQYSQNNSFFNLNPSSCTFNIQEFYLLCNKLNIYFDILKDKSSNQKSFNIGTNNLTSLGLLTHDIKNVAEFFNESVVLYFYLKEKSKLTNMSFIQYIEDNSSASDIYSLAVDISSFISSYPSPYTNE

SEQ ID NO: 151 - protein, 362 aa, Plasmodium falciparum
MGRKKRKLNIDLKPFCYYCDREFDDEKILIQHQKAKHFKCLHCNRKLDMANGLVVHMMQVHKTNLKSVPNALPKRNDPELVIRGMNGVPTDIIEENLIKLKQKLGDKNIKRQQRVNWAQVTMAPTMEQFLKQAQMGNFSFPGFNSPVLPTNNNILTNTLDINNKSTLPNIPLYIPNTTSNINNINNINNLLQQPIGNNIIYPPKNSTLLNMPIPPINKNNINNHVVTNPNTFTPSNIPPNIAHKYSANINLLPTNINQHNPMYMPPGLYPPPIPPLNHPSIPPTHIPSSTYPTKMTPIQQKRPSTKWDVPEPSEGDPSILKHNKEDSTENKNEEPHKVSQDDDLKQNEQKDNQEKNHTQNCE

SEQ ID NO: 152 - protein, 161 aa, Plasmodium falciparum
MSDHEMYDNIDAGASQTYPVQAGAIKKNGHVMLKEHPCKVVDYSTSKTGKHGHAKAHIVGIDIFTGRKYEDICPTSHNMDVPVVKRTELQLIDITEDGFVSLLYDNGDTKDDLSLPKDTEGNLDEVAKQIRNLFDNGKSVLVSVLSACGQEKIIAAKELSS

SEQ ID NO: 153 - protein, 564 aa, Plasmodium falciparum
MVNKEEAQRLKELGNKCFQEGKYEEAVKYFSDAITNDPLDHVLYSNLSGAFASLGRFYEALESANKCISIKKDWPKGYIRKGCAEHGLRQLSNAEKTYLEGLKIDPNNKSLQDALSKVRNENMLENAQLIAHLNNIIENDPQLKSYKEENSNYPHELLNTIKSINSNPMNIRIILSTCHPKISEGVEKFFGFKFTGEGNDAEERQRQQREEEERRKKKEEEERKKKEEEEMKKQNRTPEQIQGDEHKLKGNEFYKQKKFDEALKEYEEAIQINPNDIMYHYNKAAVHIEMKNYDKAVETCLYAIENRYNFKAEFIQVAKLYNRLAISYINMKKYDLAIEAYRKSLVEDNNRATRNALKELERRKEKEEKEAYIDPDKAEEHKNKGNEYFKNNDFPNAKKEYDEAIRRNPNDAKLYSNRAAALTKLIEYPSALEDVMKAIELDPTFVKAYSRKGNLHFFMKDYYKALQAYNKGLELDPNNKECLEGYQRCAFKIDEMSKSEKVDEEQFKKSMADPEIQQIISDPQFQIILQKLNENPNSISEYIKDPKIFNGLQKLIAAGILKVR

SEQ ID NO: 154 - protein, 929 aa, Plasmodium falciparum
MSAIFNESELSGLDAHSAFGNNETSSFQKKKRRIDENSQMSVNDLVDDGEEEEDDDDDEEEPSYVQDQNMAKVFEKFLKTFSEKKSEEDDDDGDSIWKDSLNFDFPSNLEIAKDSHYVLLLFSILQNSYSRNKVLIVDMKHVLMWEPTDKNRFDIGSQLYMYIKRHFLRILDIFEKKVQLLAESINPIKTKEVGKICLRFYNKKNPIHSLRSLRCEMLGEMISVRGQVTRTSDVRPELTLAAFKCNECGNIINGVKQQFRYTQPSKCPSASCSNMSDWSLVLEQSYFVDWQKIRLQEIAQESPPGSMPRNMDVILRNDIVDSVHAGDRIIVTGCLIVVPDIPTLMKPGDVPRSVARQLLKKNENSLVSQGLTGIKGVGVQDLNHKLCIYACQIEKLNSSKKDNNFDEQTQVDINCEEILNCDDLKWLRDIAMHPNTIDILAECIAPKIWGNLEIKKGALLMMTGGVQKITSNCKLRGDINMCIVGDPGTAKSEILKYVESFAPRAIFTSGKGSTAAGLTAAVHRDPDQGDTVLEAGALMYADQGICCIDEFDKMDEKDRVAIHEAMEQQTISITKAGIQATLNARASVLAACNPKYGRYDTLKTFAQNVNIPAPLLSRFDLFYTMLDCIDIDKDTSIANHLVSMHCGEEAEKHLRANAGKLDSVKLEIYLELSKRVKPLLTDEAKYKLIQYYVSFRNIEYSPGAQRSMRMTVRQLESLIRLSEAVAKLKFSHFVDVKHVEIACSIFKASMKKISNEKEINLDEEFDKVNNSLMGNKVNKLDQETENTEQNKKITTIKASEYQYISAIIFEIIKEYEFNNNNESITQDQLIETYLQVYAKAESSEQVDEWIYKLKKIINRLINQDIKLLSETNEDDPEKVIIRIHPNYAGPIVEGVSNKNTYGYNTFKNYQTQEKAPEDDVDFQEEIDNF

SEQ ID NO: 155 - protein, 608 aa, Plasmodium falciparum
MLLVIWLNIFWFIPYYCFNYVLCVGNKNDMLFVKNKNLIYPYNDMNRIRRHKGVELSRKMVAENIQMRNMKSNNNSNNVHENNNIDHSNNYNNNLYLSCSNKKKGKDVQSLCAIKHGNVLIKNINEEEKEKGIKKNDTDKLESKNDNEHKNEENNFVFSYDKKLNNYSEFNIYMENNNIEEYISDVNISREEICTLYEDMYLGRLFENLVAKLYYNKRVNGFVHLYNGQEAVSTGIIKNLKNSDFVTSTYRDHVHALSKGVPAHKILNELYGNYYGSTNKGKGGSMHIYSKENNFIGGFGFIGEQIPIAVGLAYSILYKNEFHYNPKNTSFTSTKNKNNYIQENENMIHMNNSQNVDVVVCFLGDGTTNIGQFFESLNLASSYNLPIIFVIENNNWAIGMESSRSSSDDLMNNYSKGKAFNIDTFKVDGNDVLTIYKLAKKKIQQIRNRTSGPIIIEAITYRAKGHSLADPDELRIKEEKTSWKKRDPILFLSSYMKKYNLVQESYFEQVKKNTQTLLQQAELDAEQNTKKGEHIDICNVIQQNIFAPSKSTPYQSEYENYKQFDDISNDELKEYYQEVLKEIQRKKEKKKLDPNDKFDQKKLPLIID

SEQ ID NO: 156 - protein, 1342 aa, Plasmodium falciparum
MENQIEKDMISIFTQSVSSNFEDVKYSEEKINNLYNDSNKEEYIRILLKLIMYPYNENNENKNVYDSTLNRNVKVSMLISIKNFIKKSIHSNLENMELSTDMCIFIKHICLHVLLDINNEDIKSLQKYFFEILVNLLEFNICDDYDYLLFYIIILYINDYNYIDLVHIFNNEEKKKNQDAFKIIECIMLYIQNKEIFQNINQHNFFMEYNKILQNLETIKNIIINRNNSLNDDIINYINNTKRIYKSGDKYNLFMLNDALLYNISPEGGVPTLNNHNNNHNHNQNNNNNNNNNNGNYYDNLSGVTTTNFDFRGKGTISKDYNNNIKSIDTNTLFHNNIMNIFSNMDCNHFKKKYIALKIIRKIIKKYKNNDYVSKYDLKIILTHIEYPVTLYFIYLFNKLNEYTNYINLKLNTSTNNFNTSNNNMINDELNICFYNMNSILMNMHVFLKIFYNINMIDLPEYYEDNFDIFFNIFYTLLLYDEDILNNYYNHLHLIKTVLKGSAVAPAGALNNMNRSMSIMSTIHNNNNNNNNNNNNNNNNNNNNNNNNNNNNMKNTFGNTNVTLNDLLKCKEHFNQNLIKCKIMIIDVIKILSENYQDESKIYVIKLICSLIQILYKEKDKILLCHNYNCLSSSIKLIHHMNLEKNDLNPYKDKEFVEKVIERVLNHIRLKNIDIDEIIEADLEYFRHDLNNVNSFSIRSTSIYFLKTLCNNYFHLCFPILECKILTKDALLTLSSDGMDITNKSSGSILNMSNLNNTVSINKNDPCYEACNVEYKVQLIACLNHSNLTQNFYEHMIKDLMNQFLVTIKMKYNNMDVLCYNMENYNFESPQMNTSNNNNMINMNNNMNNNKCVWLRDDDMFNTPNCIYLLSILKYLLNNRNICTTNNALDIFLFLHFLLYNEKIMIHNYACLCINRIFNQILNENIYKILLESNMVQRILNRLLFLLKYNVHNKILNEYILITILRIFLIFTYKISDFYVMVLLMIDNIIKLIINDSHNPLFNHYLFELLTIIISLIYKSQVQQHIQQIEDVIITTFSQILQIYIHDFIPYVFQILSIIVDNTYTIQKIHIKILNHLYEMDLWKSTIGNVNGIICVLKSYFKKYNIFNDIIKNNMQQLFNIYHYCLSNKKLYTDSFQIILSIFTYLPLDSYESFLKPLFVLLFTFLQHYKNDIIKIKVVHSLSVFILKTNVAVFITTLDTIQDGLIFNVLKSLYLPILDKLINVNEKIIIFLALTKLLNHDKIRNEPFVVDILNSLNKNITSNELVLKKSKVQHLDVEKDEMDQNFEVTYVKLQMINNDNVNEMVLKNININDELKQNLYNQHFMQICHNNAFNTILQLFNN

SEQ ID NO: 157 - protein, 2221 aa, Plasmodium falciparum
MESYIRESKKLTLKSNKGKKLLRYLDISLNNKSLHDSHILELVKILKKIIKIVYNTYYCLNIDLSENYITCIGLKTLLKYILNYNENIGVNILKLYKNSIKDDGALLIKQLVYIQKIPMEELHLSHNLIQDNACKELLLSFVQAKKDSTYVYPRYDKYQNPYKHAQIPVWIRLEYNCIHNPKDILKEVEDCAKKKRGYKSNLIVCSALKSDKRCCPYKCLNASIRNTPIMHVYMFIHQKENIVNGKMKEEKNDFVSLEGVLDKNEKSNFNNDKNADENMIKLDSSKLGNKNKFKNENDEFEEEEEEIDVDDVDDVDDVDDVDDVDDVDDVDDDEDDEDDEDDEDDDEDDDEDDDDDEDEDDDDDEDEDDDEDDDDDEDYDDDDDEDYDEDEDDDDENYNLKDKNNLKGFENNKRIKGNKKGSEKPFVVNKEMVVENKNKNINNEEDEKNIDKKKSMNKKKRKKKKKRVNNYNNNNNINNNNNNNSNNKKKSNLVKDKKNSSTSTCNKFMNNTHNLNKSFSNIASDMYNKDTNMSSLNTSENTLPLYIILDCSAVLDMKELWKDKSILPFSFPGLLYLYNNKLLKANTIGNNNIHMNSNNNNNNNNNNNNNNNNNNNNNNNNNNNNNNNNNNNNNNSSSGNNNTNKPGNDNFICLMCSYVANELKMVCQKSEIIRQKMINLKLNIWDKLSELGIIEFLSVPKDFKENKKNFLNSSFLTDEQIKLANEYYDISYETLQMIQFSIVWSTYIFKISNKEIIIENNKKEINKSDMKKSKKTIFTEVLYLTSSSNIYSFFEYLYEQDINFILPLCVTVNQINKYIQDEHSYIIDILMNNAKADKYGKLQFNKSFFQQFIKEKYSKYLYTNTKEEIINDKKKQSKSTLCNTKPLSCDILEQVNEEQQMFNSIKNKDGILSSQNNLQNNNGSEYLIDDGMGTMRISDDMLNNSNDIKKKKNNNNKKFSSVQQMVDNKSVAQPILSHNNNNNNNVNSINNNNNSYDIYDIISVKSFSNDNVNNMCNVDKMMNVHNNIVSSKNMKEDELLKEHHLYLKKGSEVVPNNQYYNLGEYNKLNLQMLNITDLDILEKRTDINDIFNNSLSETNKSANNTTTNNNNNNNNIHNNIHNNIHNNIHNNGAVRTNPVSSENHLILDNRNNKKKTDMLENMLYCSTVESKLMGLNKNKMEANLDMNNDNINNDNINNDHLNNDNINNVARGHTVDSELTTEDPVIQKKGVCKDKSGTPSDNKVSIYELLINAFNGKKKNVTKNVNEKNKNGVNEEGVGLMNDANCNTNNMNNVDNTNNVDNTDKLDNTDNLDNTNNVDNTNNVDNTNNVDNTNNMNNNNNMNRDDKDQSILMSQIKLKNDHRIEEEELQLKGKTNHKDNVINEKRKSMVEKKSISLHKNVNNNDNLAFLNNQQDDNVSHANHTRSTIHKMSVFHNNNMSNIPSGCAMQNDEDNMVLLGNENMLFKKGGSIMNFGDVDNNTTCAMNKNERRLTNNMKSGHNIIADNKDEELLNVEKINNGELLHIGKNICSEQLINQRKVVEWKHSFENHKVDIVNTSMLLEELILNPTVCKYVPGELYNRILKCYEKLDFMITNLNNINEEMETMKNVYNTEGNNNKNNNNNNNNEHGEHNIDNIVNKNVRTSLLKNDNIKTTTTERNNSINHSMNKNDVSMMYDDFKNYWDSPLGKNNSINNLMMMNNSINNINSGFNSMNLTASELMKSLSNGIHLNQKMNTLTSSLPHDFLLNNNMLGSMTNNNNNSNNNNNNNNSNNNNNSNNNNNSNNNNINLGMTTPLNNANIIQNHLNNSMLKNNMVNKNSAHNLASHLNNNNKVSKKKSTLSTYNNNMNEGNNSMNLNMNMNSTNNLNSSSVMMMLMNSAQNNSIQKKYINNNNNNNNNNNSNSNNNSSNSNNNNDMTVLLNNMNDVRINPNVLLNNNNLFFQGNNYKKDESNTGNKMSKDMNVINNAHANVEIMKNDNMSNNNSSNNNFVVGRDLKDIKTLNKILLLNNSNLNSVKGVSLNEKQLLNYINNNNNNSSSSSNNNMSGIPSVNSNIDTNLLTLLNMTKNNNNNNNNNNNNNNYINNIGSGINSTGISNKNLMINHQNAKNNNHNNNNNDKFKGNPFNDFNGIVTSNNIKKILNNENNNNNNLYMMNNNKTPINDINVKYVEALNSQFNFLSRDSRKIDTENNAINILNFSNDLEKKSNNTMVDICEKTNDKKI

SEQ ID NO: 158 - protein, 462 aa, Plasmodium falciparum
MARFKSQFNFMLKFKRHIGNKIIWGRTNNFFYKKEYIFSSFRNNIGKRYLSIHEYLSVDLLRSHNVPCPEGYAAKTAEEAEEKALLLQNVCGDNDLVIKAQVLSGGRGVGYFKENNFEGGVHVCRNSMEVKEIATKMLNNTLITKQSGPEGKKCNTVFICERFYIRKERYIAFLLDRNSDGIILLGSSIGGSSIEDIIKKNPDAIYKLNIDINNGLTTGQAREFSENIGFKNDQLNIVTDMIVNLYKVFKKYDCTLLEINPLSELNDGRVLCCDAKLNFDDNAEYRQKNIFEKRDLTQENKEELLAKKYNLNYVSLNGNIACMVNGAGLAMATLDLIILHKGNPSNFLDVGGGATEEEITEALKIINNNENAKICFINILGGIMRCDIIANGIINAFKQVKFNKPIIIRLEGTNQEQAHEIIKNSNIKCIVCQDMNIAAQKSVAMAKIIEIAERENIDISFN

SEQ ID NO: 159 - protein, 656 aa, Plasmodium falciparum
MAEVSPVEENVIEEIVSFEEEVETFLINLHDFVYHRNAEAIKKLFDTDFYTISEIYFKNIRWPSIKLVDIFYKQKNRFHNLIHSLYEELYYRHVFIIKDITLEDRKNSWDNYKCLLNFITTICTDLSGDSNDNVLVMPNVWIYDFLSEYIYQYQSMCHYRLQLLKDLEKNEEGILFVTRNTEVFESSIVFEVLHNLLLKGEFSTLPLEEKSTFVNNIYNINNEEINSKYQFAYFACCILLNLYVLIGDYYTALKIISNIELNHKALYWKVTLCHLSIFYNIAFSYMMLKRYNDSIKVLSQILIYLSKQKIHVSNQQKYQQNLIHKLIDKMYLIIIICHSLTNTRLDETILQNIKENYSGKFYALQSANEQTYAELFIRVAPKFIDPLSNISFQILSNFQNIQNQTYSSDPTNRQLAIFLKDVSYQKKAFYFISYAKLYHNIQLKKLANLMNYNELINNDDEHEQEQNVSSDIMCVKNCSKQLIWKEGPLYTGDIINSIFGNSFDFFIDLDIVNIKTRAHQKIFIDYFVHQINMSKNLMNNLLGAASTHMYKTKYDNFRKKLKNKTRNKHNNNNNNNNNNNNNNNNNNNNNNNNNNNNNNNNYYYYHKNKQNKQDKQDKQNKLNRQNKQNKQNHLNRHNNQNKPNHQNNMHAQVAAS

SEQ ID NO: 160 - protein, 217 aa, Plasmodium falciparum
MKNLNQNMKNNDNKKNEKISGLEENEEHNNNNIVPYYLSNLLTNPSNPVVFMDINLGNHFLGKFKFELFQNIVPRTSENFRKFCTGEHKINNLPVGYKNTTFHRVIKDFMIQGGDFVNYNGSGCISIYGEHFDDENFDIKHDKEGLLSMANTGPNTNGCQFFIITKKCEWLDGKNVVFGRIIDNDSLILLKKIENVSVTPYIYKPKIAINIVECGEL

SEQ ID NO: 161 - protein, 314 aa, Plasmodium falciparum
MMIKNFYKFFILYSLFMTCLTKKMLFINFFNEINVNYNKKKDINKICMNRLTNTNKGYTTNKEYISNNAQKNICTINYGQTYSNILNDEEKEKILQQYIYTLSHLSIIDIDREKDISLNISLLLKACLASHNYIKNVEIYTSQIKNQDICSFIYENRTDFEDFVNTHILKYIEFFNKDKIEDTLQSYIKDKILYDNELNIFNIIKNNNIELRKDILQDISFECIRLNKIIQYSLAVNKLDLFSYHIIFKIFMYFKTDQFYYHLFLNNIQKIKYYYSIKNITDQHKEIIYKIVDKYLYIIHYMNNMYQNRDIKNV

SEQ ID NO: 162 - protein, 238 aa, Plasmodium falciparum
MNETLKSSSDRNMINQNKANVVDELVKRKDEICSWCFDTLYYELKNEKYDYVPPILQKLHKGGFQIPIFVKWMKLYDKKDMGSYDYDAYELKGCIGCLADVDILEISYYAIQSSLHDTRFLPITLKDLPYLIVSITYLYNFEDCKHVYDWVIGKHGIKINFTINQKKYSATFLPEVAIQHNFNHETTVKKLIRKANYRGEINEELLNIIQVQRYEGISSSLTYQDYQKFKSSQNKRNA

SEQ ID NO: 163 - protein, 648 aa, Plasmodium falciparum
MKIGDVLHDYKLYDNTKKKSSEMVINENDNKERLLEEFEIRSKVRKVCLGIPTQDIDVKNILRLLKEPICLFGEDSYDKRKRLKNILITKYDRLIIKKKIEEEDDVEEFKNILKRYYIDFSDLYPSGLSEANKINEVHDKHKLKDVHDTKEEQNVHMKTVREEDKDILKEKCYTEGTKDLKKSRIEITIKTLPRIFLYKEMINKFQNGYSKKEYENYITSFNEHIKKESDLYVSQLGDDRPLTMGKFSPDNSVFAISSFNSYINIFNYRNDDYNLIKTLKNGHEEKINCIEWNYPNNYSYYSTMNYKDLSKHDLLLASCSSDKSFCIWKPFYDEYDDTNDNINDNINEYINENINENINENINENINDNISDNTSDTISDNINDNINDNISDSISDNISDNKNNNSHKVDKYNSNKNKLSAQNKNYLLCKVNAHDDRINKICFHPLNKYVLTCSDDETIKMFDIETQQELFYQEGHNTTVYSIAFNPYGNLYISGDSKGGLMLWDIRTGKNVEQIKMAHNNSIMNINFNPFLANMFCTCSTDNTIKIFDLRKFQISCNILAHNKIVTDALFEPTYGRYIVSSSFDTFIKIWDSVNFYCTKILCNNNNKVRNVDIAPDGSFISSTSFDRTWKLYKNKEYTQDNILSHFM

SEQ ID NO: 164 - protein, 1844 aa, Plasmodium falciparum
MNSNNFILSVYNQKIKNINNISESDETNSYHSFDTYSKSEEENNTHIFNDRTHKYQIDYLKNLLNNFIEKSNDFYIYKKIILSLKRVNEKFPFPKCYYYTAKLGSKKRKNKKINIYKNIYNKSNNNIYSNNNIYSNNNIYSNNNRYSNNNSCSNNNCSKIKFPRLCSSSSSFLASYNTYNKKQIGKIKKYRTIRYIKSIIQRIKYEIIFNNPQNCKRQNKIENKSKRNIYHLVWILKKKKKNSYLGTNWSCVHKKKKKKKNLSIRKIKKRISLNFVNYDMKSTTIENCADEQHCNMEEEEVEQIKDECNIKHLKQNDNKINVNQNEQEKFYPYDNINEEEISHPYNLYTNNENYEEKKKKTSNNLTAQNEDIVQEKIHTPFGGDNYNQELEENINKSNIISNNEIYTYNINNSFSIYKNVGNTYDNNINDIQNNKTYVKNNDDQYNVDNNNNNVDNNNNVDNNNNVDDNNNMDDNNNMDNNNNVNNNNNVNNNNNVNNNNNVNNNNNIYNKKNNIIEYMKNPCNYNICFPNIMTNNILSEDAYEENLTTPKKIVKKKQLNACCTFNIPSNSNSTLFYSNQSKMFYRPSNIYLDPMMDSSYVYWNEQDWVTRENNKNNDNYNENYKRDYFMNTTKTDTHNILNTNNINGIYNSSSFYNNNNEVNYQVEENKNNKRHNINDHKTSFHYNNFVLPYPYESNTQHISSTYNKYVQHVHMKRDEKGSIPYNMFKDDNNKENFYIHDNNKYTIYDKNKYHNKYTYTNKLPSVPFKSLKSNLDEQKYLSTGILQKDKNSFENVKNSFEEEKKNFEKVKNSFEKEKNVFFHSIQNVLCLKKEIKKIKINLNNQRKYTFLHMDEKKKNELDNLIGYLMYQKMIRKKLKEYYFNKINKAFFTFLLRSNHANFSFSPHEVMLLKKWNLLKFKQARKNHILRNIKKNTQTDYSHDSQKVVTTPRQEQEQEHNEKIVDNISISFPVTNNNIVFKPLNEYMRKKYDVNNLKKTEQRDNIIRYDDQNRRTLDNNNNNNNKKVNNTIYKEKDNIYVDDSLLNNNEHSLLKSNNILSYLSTHRIIYMKKKKKDLNCNHLNEDNDYSNNKFLQIPSESFYELYDQNKTNIFDVFLFLKNIGYKNVQKSFKKKLKKKYIYLSKINNCNKMLSHIKYLFVKLLRNQIKDIIGIYINDCFINSTICFFLSLILFIFKNIHTIKIIRSHIYLSYFNIFLDYFRNNNLKCMYFICNNILYDLMIEMDTRSNNDNNETSEYKNDEILINNNIYNKNMCDNDYQPKRYKNFLIYFNQNYIKKRKNKKRNDISIHNNKRDQGGKQLVQQCEENTEKKYMQEQKININNSEQGKEKKIHKRRKKKYKIIIRKDKCKKYFISTCEENKIVYKKKKKTIFFDDYGFYNYFTKKKKKNKKKKQNQQIGNDNKENINGAQLTNNNNDGMEKALDHDTNYKKNEKMNKQKKKNNNNNNKMERKQSKLQQFINKLKMKKGNDSTTKDYDNNNNINDDKKNINDDNNNNNIYDNNINIYDDNNNFNDDGRGNHINKYNIHSSSNNQSCISLDTLDGNSYDTYSHNIPKKHLYYLDLNKLEILKLCSNKLDDDALIYISNLIKKNKLNNLKVLDLRWNNFTYKSLLTLSFSLTNIIIKNKSTNNHIIKNQKEQKEERNKKIQLRKLLLSGNNINSSLYSSFLSSFCTCNYVVVKNLDFSMNKIDNDGLYITYKYLQHIKKIQEKKKLAMFKRNQIYKEYEKLTPNQKEILHMQKKIKNKKNKLCNIYINLDHNNLKNSVYINKINKLLNNFPIQNYKKKKFKKHTNHNNQHVILSMQYNNIKNVYTNQENIKQKHRIQI

SEQ ID NO: 165 - protein, 275 aa, Plasmodium falciparum
MKMELLNIKNNDNIPLGSMRYTDLSYGCESELSSNEESPFFSVGDFTNELHSSFDDISDYILVDESDLKRDRSENTTGSESNVMIASMRVDDKRVGNEKIKKELKSFSYSEESKTCSDNTHNEDGSKKQNFSRTLGTEGRKRMLKLLRRAYKYNDECKIIMKNKNPPLSISFLPYFNLSMLWQLAEDFGVYNEALKIHRECIKKRNASVKLKASAKASANYNLQDITKVSKNSKTEYASDIASNADMNTAEDYDMTNGSINEDGQGKRKRKKISF

SEQ ID NO: 166 - protein, 380 aa, Plasmodium falciparum
MINRKVCLLFLAVFFVLTIFKKLLKWEIFIEAWYTQEETDDDYDRMKLYDVLGVDKNASSDDIKKSYRKLSKKYHPDKAKDKNSNNKFSEIAEAYEILGDEEKRKIYDRYGLEAAKNMESNKMDEDPSDHFNIYERFFGAGFKREEEIKKADSLILNIEINLEQLYNGEFFSVMYTRDVKCLRSDDCIERKKECSGKGYKTITQQVAPGFIMQNKIKDDECIDRGKAWNKKCTYCPNGMKEEKTIELTLEIEKGMKNNDKIVFEKKGKQEIGYENGDIIFIVQTKKHKIYERVNNDLHQIYEISLKDALIGFSKNLEHISGKPININKQNVTFHNEVLRVQNKGMPIKNSNKFGDLYIKFLIQFPKQLTDEQKKVLADLL

SEQ ID NO: 167 - protein, 332 aa, Plasmodium falciparum
MNAAAVELINRLKKEDESNNKCFDCGISNPDWVSVNHGIFLCINCSGVHRSLGVHISIVRSIKMDIFTDEQLKYIDKGGNKKCQTYLENYGISDFIPERKYRTKAADHYRKILRSIVHNVDPPAPLPLDEGKSLINYGRNENVNENNKNQYSNEEPDFISSLNTSEIIENVSATFSNLINKASSMTTNTINNLNTNDLIESTKGTIINSGSWFTEKTKKIAENVSDNPWWAKGQSKIKDVTQNASGWISTISSTVSRTNSNFFFSNNDTNINNGNNEDINNNNTNVNSNGNTTNNNNEQAQNNNNVNFNYNSSNANNEYLNYGMNENNSTFN

SEQ ID NO: 168 - protein, 815 aa, Plasmodium falciparum
MMEELFKILFELVKIGDEEIQNYLKERIIDEKYEIEKNGVDYFYDLVCSYADDKIKRSKIANIFNKHFKNDNIQNGSNPNNIPNQHVLSIQNNKNLEKLEEVFNFKEYWKDKDMSNYSDPFLGVYEKQINYNTSVPISESLKISKEKEKQKQKQLNLFKEWVKNKPKIPQPVRVHNLLHCSDVGKNKTKIDKLYDIRIDNFNISIGQRSLLSDTTLKINVMNKYGLIGKNGIGKSTLLAKLARYEIEEIKKDISIACIEQELCLENVTVLESVLMVDKLRHDLLLELEQLEARKIKLDPNEEILSNETEEKNTQKNDTKNNKHNKNNKNVENMEPIETVESIEQKILDIYEKLNSISYLEAEKEASKILCGLGFDSNLQKKKVNSLSGGMKMRLCLSRILFSNNDIILLDEPTNHLDIYTIQFLIDYIKKLNKTCIIVSHDRDFLNEVCTDIIHFHNHQLTYYSGNYDQFEKTRIEHLLQQQREHDSLELKKKHVQKFIDRFRYNSKRAALVQSRIKLLNKLPVVNLEKEDTPFSFSFLEPFYMSNVLIKLKNVSFRNKMFTNLRVRKNKNILIGDHENETNEETYEDENELDNNGQPVSKTYEDKYKFKHEYLFKNASFEVDMDSRIAICGVNGSGKTTLIKIILNLITVYEGELHVSNKANIGYYSQYHVDCLNPIYNSIQQLQYTYSNKNIKEEEAIKYFNKFNIPTNILYEPIYVLSGGQKSKLALAILAYKNPNVLILDEPSNHLDIESVQALIVALNMYKGGLIIISHDTYLIKHVADEIYHINNITKELVKIDYEFDKYTQLLLNNKI

SEQ ID NO: 169 - protein, 327 aa, Plasmodium falciparum
MKRKYLSGHNRPLTHVNTNYDGDLLFTTGRDKKFILWRVSDGTQIGLYECSGAVYNSDVTYDSKRIVCSSAANKVYLFDVYTGEPLKIIEENGPVRFVEFNKDPLNQDKIVVAHDRLKSDHKRSIKLYDLKSDNLIWKQDHESRCIQVRWCFFDKLILSAHENGEIVVWNAEDGHLIRKFQAHSKEVTNLSFDKDRMLMLSSSLDGTAKLRDGVNFEIINEYKTDRPLNTCDISPLFKNENNPKNHIILAGGQAAEHVTTTASGEGKFQTLLYDIIHSNELGSIKGHFGPVHSIKFLPHGDGFVSGGEDGFARIYHFDNDYFIGKYD

SEQ ID NO: 170 - protein, 207 aa, Plasmodium falciparum
MTENRSRDYDYLYKIILIGDSGVGKSCILLRFSDDHFTESYITTIGVDFRFRTIKVDDKIVKLQIWDTAGQERFRTITSAYYRGADGIIIIYDTTDRNSFLHINDWMNEINKYTNEDTCKLLVGNKADCKDDIEITTMEGQNKAKELNISFIETSAKDATNVELAFTMITQELIKKKKKKNFTSLKNNHAKLKLSTHDNSPQSFCSC

SEQ ID NO: 171 - protein, 171 aa, Plasmodium falciparum
MSKRSKVFFDISIDNSNAGRIIFELFSDITPRTCENFRALCTGEKIGSRGKNLHYKNSIFHRIIPQFMCQGGDITNGNGSGGESIYGRSFTDENFNMKHDQPGLLSMANAGPNTNSSQFFITLVPCPWLDGKHVVFGKVIEGMNVVREMEKEGAKSGYVKRSVVITDCGEL

SEQ ID NO: 172 - protein, 194 aa, Plasmodium falciparum
MDAVQKRVLKSNPSDLEKEIAQCLLDIELSSSSDIKTDAKEIKLLSCDLIEVEKLKKKTILIYIPYKIYTTYVRKIQRKLINELEKKTKKYVVLVAKRTILKGKQKNKSFKIIPRSRTLTSVYDSILEDIVSPSEIIGKRISMKADGKRVFKIMLDSKERQRDNIEEKLISFAAVYKKITRRDAVFSLPPTNEK

SEQ ID NO: 173 - protein, 294 aa, Plasmodium falciparum
MAEHLARIIGTEEDRVNCPFFWKIGACRHGDQCSRSHYKPNCAQTLVIRHMYDNPPIAVAIAEGQMVEDEVLDKAADHFEEFYEEVFDELMKYGEIEDMVVCDNIGDHIIGNVYIKYTHEDYAEKAVNELNGRFYAGKPLQIEYTPVTDFREARCRQFVEGQCRRGGYCNFMHIKHVPRTVKRKLFRRMYKKYPEYKKRRARKDDSDDDGRRESYREGKDKYKRDRRSSHHYSSKRKNRSDNEDDDDDEERSYKHARRENSAERREKIERWNKEREMKNMNKEDNKSNADEKED

SEQ ID NO: 174 - protein, 1188 aa, Plasmodium falciparum
MNKGLSKILELGFFVGSFFFIWYITGEKIFKRKKKIVKENILLILRNLCYEIYTVLCETSKTTKHVYDMLKNESNTTIELSRLEEVLLNNGYKKKIEDVEKNVLKRFNVSVEDFYEELKNYEKDPDVQKYLNSIKKMYNEALLGLQPKLPSIDEKISEDVIINLTSLIYKEKRKIYKTKIDSMLKNNEIIDIQNTLSNAQFFENLHKSTQHVEEQIIKENNNLVPNLFTFKYLVSYYSNDPNFLQKKKYLESKHGEKMIKILKIKTSKKKKKRAHKEDRQSSNSSVSFKSTPSLDVYNVPHLGTLEKEEDHYSQQSKEMEHMDKDSHVDFIPHNVDANLDKRDEQIEYISESGDMQPEKEYYEGEHITIRYEEEEDISEIYEEDRASRIYEEDRASGIYEEEHASGIYEEDHEERYRTSQVSERSIKKSVTSQQDDIIHSHEEDNYVSDREVIHDDSFVGDKDQIFDDNYVSEREEIKQDDDYISEREEIKQDDDYISEREEIKQDDDYISEREEFKQDESFVGDKDQIFEDDNYVSEREEIKQDDDYISEREEIKQDDDYVNEREEIKQDDDYVSEREEIKQDESFVGDKDQIFEDDNYVSEREESKQDESFVGDKDQVFDDDYVSEREEIKQDDDYVSEREEIKQDESFVGDKDQIFEDDNYVSEREEFKQDESFVGDKDQNFDDDYVSEREDIKQDDDYISERDEIKQDDSFAGDKDQNFEDDNYVSEKEEIIYDNNNISDREQVIQDDNYVSDKEEIIYDNNNNNNISDSEVDKENNNYVYENDEIIKDNKSMNEKDSSIHYDEEGTVKNKDIIENVKEENSDIQMLENDIINNINNEIIDNNENEIINNQSKVENNTSMTEYEDVIDMDYKSPENLFMFDQEYNINEDHKGEINNNDNDNSKSVSGMGEREVSNEENREDEMIRNEEVDYIKDDDEHNTDDIKEDDEHNADDIKEDDEHNVDDIKEDDENNADDIKEDDEHNADDIKEDDEHNTDDIKEDDEHNTDDIKEDDEHNADDIKEDDENNADDIKEDDEHNTDDIKEDDEHNTDDIKEDDEHNADDIKDDEHNTDDIKDDEHNTDDIKDDEHNADDIKDEDNDQVEDNQELNENLEGSDVPKDDEALNIEDTSEEQKETDDKIESGSVRDKKNEGSTEKKIETKKGGLLMGIMKRKRFMSRDPKKKS

SEQ ID NO: 175 - protein, 112 aa, Plasmodium falciparum
MAMKYVAAYLMCVLGGNENPSTKEVKNVLGAVNADVEDEVLNNFIDSLKGKSCHELITDGLKKLQNIGGGVAAAPAGAAAVETAEAKKEDKKEEKKEEEEEEEDDLGFSLFG

SEQ ID NO: 176 - protein, 458 aa, Plasmodium vivax
MDGELDVDEEAYDMLFSPVTPWPCLSLDFVLSRPGGGQPPVGEAKKKGRDKGGRFPLAYPLQITCVAGSQAATGSQNEIYLLRWDNLNRLGGGEESGEESSEESGNSGQSDDGNHLGGHGEKKQTGAPPPRLARKKEHVVCKAIKHPHGGLNRIKTCKKINSLIATWCEDGNVYVYEMSEEIRHLDERPYHEELVKKPLHVFEGHTTEGFSLDWNPVHAAKLLSGDNEGNLFLWLPDNEVKWTYERLSIESGTQQKGDRSDGKAKGRKKHTIEDVQWSKGGNGFGHVFAMCSSDRSVSIIDTRDLKKDNQKREGRNGTHLHIADAHAADVNVLSWNENVPFLIASGGDDSIVKIWDIRNASNPVAELKFHKQPISAVSWDHSDTYVVLAASLDNSISIWDLSVETESLEFGLTKHPDQLLFEHLNQKFITDAKFHPLHPGLVVSTSSNKFNIFKPCNV

SEQ ID NO: 177 - protein, 470 aa, Plasmodium vivax
MIMASFHPRGALGFIAPYLRAFSPVEGRRCITYQSLRNQGSLKSVDDEAFNLLSSHYKNGNCLNLSVSNNIIPKYVRDYFSLDLNKSLSFDVSHLKLIEDMALSLFHLEPKYWGCTFGVNSTGDYPPGEEDIPFLFTLFRSLINCKGRIMNISFALAEEGEANNPLIENHYDCVNVKLKDKVDYDEIHKIYDAFNPHLVHVDETNNPHNFNYDFFSSLKDINKCVVVANISNKGSLISQDFIPSPFNHSDVVYTYFNENMRAHNCHVIFYKRGYKQVDKEGKLIHYEYEKKLKNQFLPIRVNNTIFSFLTSFKMMKNAEFKEYVIQSKENTRALLSHLNKNFFNIQYAQNGNFLNLNCTVPPFNVYEFHEFCKQLNIFFDILNPFKYTQKSFNVGANYLTSMGLLEGDMKTVAEFLNRALSLYLSAKRQTNCAGNEFVQFLKRTCVTSPSMLSLSNDIFCFISSFPDVHS

SEQ ID NO: 178 - protein, 366 aa, Plasmodium vivax
MGRKKRKINIELKPFCYYCDREFDDEKVLIQHQKAKHFKCLQCNRKLDVASGLVIHMMQVHKSNLKTVPNALPKRNDPEIIIRGMDGVPPEIIEENLSKLKQKLGDKNIKRQQRVNWAQVAMAPTMEQFLQQAQMGNFSFPGFNSPLLPTNNLLPNGPPDSKKKNIPPMPLFLPNNFNMMQPPPLGANMYPPVNQQNASMPNMPPPHMPSSMTPPNAPSSGPAGFPPNIPTLPPGSAQKYPPNVNFPGSAFPQNLSPNMFQPPPHSMYMPPGLGQPPVPPSAPPMMPPAIPPSAPPGMAPHQPLNPDDVDAKLEAGAPDGENSSPTKSDTKNEHKDVSSNHGEIANQGQPHSADENENPGGSDSGK

SEQ ID NO: 179 - protein, 161 aa, Plasmodium vivax
MSDHETYDNIDAGASQTYPVQAGAIKKNGHVMLKEHPCKVVDYSTSKTGKHGHAKAHIVGIDIFTGKKYEDICPTSHNMDVPVVKRTELQLIDITEDGFVSLLYDNGETKDDLSLPKDSDGNPDDVAKQIRTLFDGGKSVLVSVLSACGQEKIIAVKELSS

SEQ ID NO: 180 - protein, 559 aa, Plasmodium vivax
MTNKEEALRLKEIGNKCFQEGKFDEAVTHFSNAIKNDPQDHVLHSNLSGAYASMGRFYEALESANKCISLKKDWPKGYIRKGCAEHGLRQLDSSEKTYLEGLQIDPNNKSLKDALENVRKEKAAENMEYINHINTIIQNDANLKAYKEENQNYPNELLNTIKAINANPMNIRYILSSCDRKISEGVEKFFGIRFNEDAAYNEERQRRMEEEEMKKKKQQEKEEEERKKKNRSPEEIQGDEHKQKGNEFYKQKKFEEALNEYDQAIQINPNDIMYHYNKAAVYIEMKQLDKAIETCLYAIENRYNFKADFAQVAKVYNRLAISYANLKNYDKAIEAYRKSLVEDNNRATRNALKELERKKEKEEREAYIDPEKAEEHKNKGNEYFKNNDYPNAKKEYDEAIRRNPNDAKLYSNRAAALTKLIEYPSALEDVMKALELDPNFVKAYSRKGNLHFFMKDYYKALQAYNKGLELDPNNKECLEGYQRCVYKIDEMSKSEKVDEEQFKKSMADPEIQQIISDPQFQIILQRLNENPNSISEYIKDPKIFNGLQKLIAAGILKVR

SEQ ID NO: 181 - protein, 944 aa, Plasmodium vivax
MSGMFNESELSGLDAHSVFGNNEASSYQKKKRKYDENSNLGTNDVMQEEEEGEAEEDDEEDDEEDDEPSYVQDENMAKVFEKFLKTFSERKSDEENEDDEDGDNDSVWKDNLNLNFPSSLEIAKDAHYVLLLFSILQNSYSRNKVLVVDMKHVLMWEPTDKNRFDIGSQLYIYIKRHFLRILDIFEQKVQALAESINPIKTKEVGKLCLRFYNKKNPIHSLRSLRCEMLGEMISVRGQVTRTSDVRPELTLAAFKCNECGNIINGVKQQFRYTQPSKCPSSSCSNMYDWSLVLEQSYFVDWQKIRLQEIAQESPPGSMPRNMDVILRNDIVDSVHAGDRIIVTGCLIVVPDIPTLMKPGDIPRSVARQILKKNENSLVSQGLTGIKGVGVQDLNHKLCIYACQIEKLNNSKKENSFDEQTQVDINCEEILNCDDLKWLRDIAMHPNTIDILAECIAPKIWGNIEIKKGALLMMTGGVQKITSNCKLRGDINMCIVGDPGTAKSEILKYVESFAPRAIFTSGKGSTAAGLTAAVHRDPDQGDTVLEAGALMYADQGICCIDEFDKMDEKDRVAIHEAMEQQTISITKAGIQATLNARASVLAACNPKYGRYDTLKTFAQNVNIPAPLLSRFDLFYTMLDSIDIDKDTSIANHLVSMHCGEEAEKHIRANAGKLDTVKMEVYLELSKRVKPLLTDEAKYKLIHYYVSFRNIEYSPGAQRSMRMTVRQLESLIRLSEAVAKLKFSHFVDIKHVEIACSIFKASMKKISNEKEINLDEEFDKVSNSLLNSKTSKIIQPEDGENKPVESKKVMTIKASEYQYISAIIFEIIKEYEFNNNSESITQDQLIETYLQVYAKAESSEHVDEWIYKLKKIIHRLINQDMKLLSEINEADPDNAILRIHPNYAGPILEGTVSNKNTYGYNTFKNYQTEEKIPEDDVDFQEDIDNF

SEQ ID NO: 182 - protein, 497 aa, Plasmodium vivax
MVKTHVVGSKRLDDPMVKIFQLDERAPMAEPNRREQNGADAEGAKERPPMSASQTNYNIYLPDNQLEDYLSDVQISKNEMTMLYEDMHLGRMFENLVAKLYYSKRINGFVHLYNGQEAISSGIIKNLRPSDFVTSTYRDHVHAISKNVPPRKILNELYGNYYGSTNRGKGGSMHIYSKSENFVGGFGFIGEQIPIAVGLAYSILYKREFPQGGAEVRSGAEALSGTEALGGTSSPSGAAPPLEDADVVACFLGDGTANIGQFFESLNLAATYNLPILFVIENNNWAIGMEGSRSSTDDLQNNYSKGKAFNIETYKVDGNDAISIYKLAKKKINQMRRRECGPVLIEAITYRAKGHSLADPDELRIHEEKASWKKRDPIVHLASYMKKKNIVDESFFEQVKKKTKQILLEAEMDADQNMKKSQDVNICQLLRDNIFAPSEGAPFQADYHQYATYDPLSDSELGEYYEALRREADRKLHNRKPDPSEHFASRDLPLLID

SEQ ID NO: 183 - protein, 1386 aa, Plasmodium vivax
MEEKVESELLRVFARSVSSNFEDIKQSEAKITALYEHPNREDYIRLLLKFVMYPYDEKNQKKNLYDGMLNRNVKIAVMISIKNFVKKSVHSNLESLELSPDLSIQIKHFCMHFLLDVNNEDVRSLDRYFYEILLYLFKFSICDDYDYLLFYLITLYISDGGGDSVVQLLHSDERKKVDDTAKIIDCIMLYVRNKEIMEGLTQDNFFVEYAKFVANLEEIKNVICCRNKSLNDDIVNYINNTKRVYKTNDRHSLFLLSDCTLYGLPGVGVASLSNLVSVVNVVSAVSVDNAANAANAANAANAANGANAAGGGMGGPQFDFPGKGTIANDYNGNVKLVPLATAMAHSSRHHINTTLLRKKLIAMKIIRKIVKKYKTNDYVSKYDLKIILTHIEFPLTLYFVYLYGKFSECSGYLAEKLNVGGGAVAGANALLTGGRAELKPSEAYLQISNCFLAMNYLLQNMHVYLKVFYAIIGVDLPEYFEDNFEVLFNIFNNMLLYDVGMVANFVRVMEVLHGAGGAAQYSAGGAPYSTGAAASYSGGAANLASGQFAPPELSPQELAKLSGNFVQNVLKCKVMLVDVIKLISETYQDESKKYIVKLVFSLTQLLYSEGERNLLCHNYNCLASTIKLIHHMNLNKNDSNPYKDKQFLQKIIERVLHHIRLRRTDIEEILDADLDYFRNDLNKVNSFSVRSAATHFLKTLCDNYFDACFPMLEVRIFAKDSLMFFSASASASTNRADALGRGGVGGGVVSTAISPSTQMQNQFGGLHHGGSAAEESNNLHHVGIDKNDPFYEACNLEYKIQLITCLGQVNLAQNFYEQNVQHILKEFVMTARMKYPDVDSLCYGIHDYDFGARPGGGGGAGGGSGVGGNSGAGGGGISGGYGIPCVAAPPGGGAKCVWLRNEDLFSKQNTIYLLSILKFLLNNRSICIGSNNALDVFAFLHHLLFTDKVMIYCYACLCMNRILNQQISSDLVQAIFTSCLSKTLTRLLFLLKYHVHVKVLNEYILITIMRIFLLCPEKLANLYVPLLLILDSTIKTIINDSHNPLFNHYLFELLTVVISLIYKSHNVSGINQVEEVIISTFSQILQMYVHDFIPYIFQILSIIVDNTCTVQKIHVKILSNLYEMDLWKSTVGNVNGIICVLRSFFKKYQLFEEIIKSNMQQLFNIYHYCLSNKKLSTDSFQIILIIFTYLPVEAYKTFLKPLFVLLFTFLQQYKNDIIKIKVVHALSVLVLKTDVSLFVGTVEQIHAGLIFNVLKNLYMPILDKLINVNEKIIIFLALTKIMSNEKIRGEPFVVEMLSLLNQNITNNELVLKKTKAHHQDVQKDELDKNFEVTYVKLQMINTDNINETVLRDININLELKQNLYNSVFMQICHTNGFSSILQLFSS

SEQ ID NO: 184 - protein, 2099 aa, Plasmodium vivax
MESYIRESKKLTFKGSKGKKLLRYVDISLNNKALHDSHIVELVNILKKYIKVVYNHFYCLNIDLSENYITCTGLKTLLKFILNYHDNIGVHILKLYKNNIKDDGVSLIKQLVYVQKIPMEELHLSHNFVQDDTCKELLLSFVQAKKENSYVYPRYEKYQSHYKHLQIPVWIRLEYNCIQNPKEILKEVEEFAKKKRGYKSNLIICAALKSDKRCCPYKCLNATVRNTPIMHVYMFIHQKDSPAYAISTNGKVGKEERKREFSSPSEVVDAGRMHASAHLQHKAQPEGVERQDGEAALPAKGEARSGAARSAAKSAAKGAAKGAAKGAAKGAAKSGKDKKTAVRKGGANSGKRLSRGSLPHDVSADEEEEEEEEEEEEEEEEEEEEEEEEEEEEEEDDDDDDDDDDDDDDDDDDYSEEEEEDDDDEEDDEDEDDDDDDDDDNDDDDNDYRHKRGKPLKGKEKNGQLPDAAPLYASKNGAAIGAQTNGRDEEDYDEEAEEGEESPNAADPAKKKKGKKKKKKKKKKKKEQVEVSPLEGGCEEAKGSGERGEEGSAVGGESGLGDGSGDESGDDNDNDNDNADRDDCDRRDHRYPREDLFRAVGGDPLRLDGGGEEDALPPELCPPRQDRLNLTSDAASSLPLYIILDCTAVLDMKELWKDSSFLPFSFPGLLYLYNNKLLRSNAEGASGGRGVNGVSQNDAFICLMCSYVANELKLVCQKSEIIRQKMVNLKLNIWDKLSELGIIEFLSVPKDFKEKKKNFLNSSFLTEAQIKLANEYYDISQETLQMIQFSILWSTYIYKIGNKEIIIKNASKEINKGGMKKSKKTIFTEVLYLTSSPNIYSFFEHLYGEDMNMILPLCVTVNQINKYIQDEHSCVVELLSSGRPVGDKGGNFLLDKAFFKAFIKDKCARYLPDGEEGVASIGGATNGGTTNGGTTNGLPSNGGIANGGTSNGLPSNGGIANGGSSKKKKKKGAPPKRSADKLKDGFPSAHDNGTPSMSSLSAATPNCTSRSDKLSPGGKRSDDECVRGSLPIGGTHINTNAYDYLDIKSVKSFSNENISKLCQLESSIQGGPFGMVGINGGGRMAAPMGGDRHSHYNDPSGGANKVKTNVGGRASGEETHKGAEKGNAAVGMYASPIDANNGGNGFGMMMVTPPSGSAKENPQGGKENKGSSLYSMLVNAFNGKKKGAQKGAERGADRATDRATDRGVASGQDKSGNNMFMGAGPNQSVRDSVDPLSSHAGGENSQNEGGHGNNAAAAAAVATRPQLNMSNGKVKSTGADLLDQLMHGGSESAPSQGKAASGLGANGGAATSPQMGIPSNDKATYLGSNNNSGSNHSPAHSLFAFNSSMLKGVAPSGKGDLSFQSQMGTEGGGSGKSGSGIGAGLLGGVNFPMNGAGMGTLANRTTQGNSKQLQKNAVETIIGSDLLNVNEVELNNFMGSIPKSFNDSLSMYLDSSNRNDSCYDGIARGENMMPFFNHSLLKGDAEQDLANLAARAEGHSRAEDHSRGADHSRVTDHTRVADHNRVTDHNRVTDHNRVTDHTRLNEMKNVFELYKVDILNTSLLLEEMILNQNVCKYIPSELYNKILRCYERLDCLLAGLNRVGSLSGLSGLSGLSGLRGVSGASGVSGMSGIGGMSGIGGMSGIGGMSGIDAIGGMNQDILCEDFKSYWDYAFSKNESSPLALLTSGGGSGIGGGGGAAHQDFTDGAGNISANKSGNASNAMFYNTVSGNRGSKSALKSSMLNASSHSANGGIGGGSGPLLASHLNSQNNGAVTPKKSRKKPPMNVSMGSGNNVELGINSMKNNSSQKKFMGGLSDGLDNTGFMNNSPGGNLSGSRNSQMGRNANYGLGQSIPPNRSGNGNQAGARNSGSGSNNAKSKDMKNHNAGPKDRNLNSVETDEYKNVNKLLLLGGNAQNVKMNGEKNPYDHGGGGSGGNAHTEHQEHFPHKMNPYNDGGGSGACDSNLLALIHMKKNIKNGVSSSAGPKAGVNSGGANGGGANSGTANELNGLRNRSYKKLLNNESIGLFNSPANKNTVNEMNLKYLEVLNSQFNFSARENRKNECDPNALNSSVMNFQNDLDKKYKNPLVDLCDKGSVKKL

SEQ ID NO: 185 - protein, 462 aa, Plasmodium vivax
MINLRRESKFILKLRRSMGHWPSLNNGRAKWTPRSGMANHHALTSKRHLSLHEYISIDLLRNNMIPCAQGYAAKTPEEAEEKALELQNLCGDVDLVIKAQILSGGRGVGYFKENNFEGGVHICRNSTEVKEIASKMLRNTLVTKQTGEEGKKCNTVFICERFYIRKERYVALLLDRSSDGIVLLGSSTGGSSIEEISKKNPEAIHKMRIDVQNGFSSGQSREFCEKIGFKNTQLDIATDVIANLYKIFTQYDCTLLEINPFSETNDGRVLCCDAKLNFDDNAEYRQKEIFQKRDLSQENAEEIQAKKFNLNYVSLDGNIACMVNGAGLAMATLDLIVLHSGSPSNFLDVGGGATEDEITEALKIINKNPKAKVCFINILGGIMRCDIIARGIIRAFKEEAAFGKPLIVRLEGTNQDEAEELLRQSGVKCVFCQDMNLAAQKSVAMARIMETAEGAGVRVAFT

SEQ ID NO: 186 - protein, 602 aa, Plasmodium vivax
MAEYLEGEGGAGAEKPVSFEEEVETFLINLHDFVYHRNAEAIKKLFDTDFYAISEIYFKNIRWPSIKLVDVFYKQKNRFHNLIHSLYEELYYRHVFIINDVTLEDRKNSWDNYKCLLNFISSICSDPSGDTNDNVLVMPNVWIYDFLSEYIYQYQSMCHYKLKILKEPEENKEGIDFLIKHSDVFESSIVLEVLHSLLLKAEFVTLSEEERAIFVHNVFHVNNEDLTSRYQFAYFACCVLLKVYVLMGDYYTALKIISYIELSHKALYWKVTLCHISVFYHIAFCYLMLRRYNDCIKVLSQILIYLSKQKVHLSNQQRYQQSQIHKLIDKMYFIVIICHSLSNTRLDETILQNIKENYSGKFYALLQTTNEQAYADLFYKVAPKFIDPLSNISFQLLASFENVQNQTYNSDPMTTQLNIFLKDVSYQKKAFHFISYAKLYHNIQLRKLSSLMNYGQQRRPAEGDTASQENHLGEVQKGEPSPDEALALVSADIMCVKNSGRQLVWKDGPLYKGEVVTSVFGSAFDFYIDMDILNIKTRAQQKIFIDYFLHQINMCKNLSSNLQGTPAPHAYKPKYDNFRRKGKAKPRRSGEAATERWSCQAS

SEQ ID NO: 187 - protein, 262 aa, Plasmodium vivax
MKGSGGDDPHGDGQEGESPKGGGSPNREGPKTGSPKTGSPKASAPKGEENQSERPPNKRSKGKQIDQLIIEEADENTIIPYYLSNLLTNASNPVVFMDVNLGNHFLGKFKFELFQNIVPKTSENFRQFCTGEYKVNNLPVGYKNTTFHRVIKEFMIQGGDFVNYNGSGSLSIYGEIFEDENFDVKHDQEGLLSMANSGPNTNGCQFFITTKKCEWLDGKNVVFGRIIDSDSLILLKKIENVSVTPYIYKPKIPINIVECGEL

SEQ ID NO: 188 - protein, 283 aa, Plasmodium vivax
MLFVDLLNGVNVNYKRKVPICKRPTRSAEYLSNQPLHANRNVEQTSSKNGEASITNHEDEKDENILQQYIYTLSHLTIFDVDRDKSTPLNIALLLKACLASHNYIKNVEIFTSNVKNKEICSFIYERRNDFDAFFKLHVMKYIDFFGNPQIVETLKSSVDNKEMYQRELEIFNQIDGETKLRKDLLEDILFECTRLNKIIQYSLAVNNFNLFSPTVLLKLFTYFKHYGVYYSIFLNNIKKVKYYYQTKDIREEDKRKIEKIVDHYLLTLDRFNHMYEAGHVTL

SEQ ID NO: 189 - protein, 236 aa, Plasmodium vivax
MQPAQSEEQTEAQVPKSQAKIVNELIENKDSICAWCFDVLKNELKNEKLDKAPPLIQSLHKSGFKIPFFVKWMKLNDVKDMGSYDYDAYELNGCIGCLNETDIMELRYYALESALNDTRFYPITLKDFPSLIVTITYLFNFEKCAHVYDWVIGKHGIKISFVVNKRRYSSTFLPEVASQHNFDHQTTVKKLIRKANYRGEINDELLENIQVERYEGVSCSLTHVDYERGKRGEAVR

SEQ ID NO: 190 - protein, 644 aa, Plasmodium vivax
MKISDVLSESILSENGKLKKSGIGMGFGVGIGKGKGETASSENVLEEFEIKSKMRKVCLGIPTKELDVKNILRLLKEPICLFGEDSYDKRKRLKSVLVTKYDKFVKKKNVDNEEEVEEFKNILKRYYIDFSKLYDVNSPEYLKINELEEQLGTKRLKQQSIAAKGITVRSTIKEKFYTESSEALKQARLDLTLKTLPRIFLHKEMINKFQEKFSKDEFERYISLYSEHMKSEFDLFISQLGDDRPLTMGKFSPDNSVFAVSSYNTYINIFNYQNDNYNIVKTLKNGHEDKINCIDWNYPNNYSYYSTLSYRDVQKVDLRLASCSSDRSFCLWRPFTEEDLLDDPGALYRDAREKAATGGKNKGGEHSGEHSADQLSDDEEDPKGAGARAKGDQHNGEGEKKKPNNGSKSDRSGKNGGGGKGHLLCKVKAHDDRINKISFHPLNRHVLTCSEDETIKFFDIETQEELFYQEGHNANVYSATFNPYGNLYLSGDSKGGLMLWDIRTGKNIDKKKMVHNNCIMNINFNPFMPNMFCTCSADNTIKIFDLRNFTVSCNILAHNKIVTDAVFEPTYGRYITSCSFDTFIKIWDSVNFYCTKILYNNDNKVRNVDVSPDGSFISSTSFDRTWKLYKNTQFAEENILAHFF

SEQ ID NO: 191 - protein, 1651 aa, Plasmodium vivax
MIDDILTADESDNNFFDGGIKFFKSDETNSFHSVEPVVASDDEGDEDAEEKEDQDEPGGPHHVEEAAGHGTCTPLGEKLKEGHHSSLTRTAVDNSTPSSNQLCEYKNIILALKKINESVDSAFDCNSVNPFVGEQGRQRIVKKKKKKKIGEPQKEQVKGARQAEQVTGERQTEQKKTAELGRGTKKITPLREQVETGKKKILNGLRPLENCKVRVKGCNTREERIGQLPGEHRSVGVVEEFAGGVVLPRARCVSRRRHHEWNGGLEGEEAEGAQEAEEVEEAEEAEEAEEAEVGVAAAVEAQPARISLRRKGEHSEGNEGAHDGARHLLGGSHFTRKAAKCRGSSPSCTQGFNSIACSMTSSAGGSSTAQGGIDAVEEAIDGVAMDAVVEASSEVAMDAMEEASSEVSIDAIDHVSPHTGANGRGEEKTPCSEDADPLAGMDGEASVGEKGSPGGSPTDHVQRRSIPNGAPPLASPSYHNISDNYSAVYSSRKGEGGCHTWRGKSAKLEDSVQQGKGRSTPFFCVPPNCSDKRQDGEAFPFFCYYGCGKDALQPGWRQRQWSVQSEKTMERRMTIRGRGNSVPSEYTCRRRVSSSTDISSLTYTRSKEMVEGMNRRGLEGRDPSGEPLNHWGEEEPRYHWGEENHRGGCAASERVLPKFKSLSNDVGETHSEGRHFANASVGQSKEECYVGNSQGRGVGRDLGRGLPPWGDHPREGQVEPESGDDREVYPMEGGGRIPLLAPSTRMYSREDVKRGDLFVRGGCGLLVPPFKGLKVGYRSSGGSRQSEKNRRQVDTGQSGEPIRGRSGFRAEKDIFFEAIRNIIRIMKEIRKIKMNLKIERNYSLVIQDKEKKNELEKLIDYLTYQKEVRKKLKKSYFDMINKGLFTFLLRSNRANFFFTEEEVKLLKRWNEIKFTKVGSSSGGNTEGEGGRTNCLGRSGGGSHTEGGPSDRRKILHRLRRLNDVIGQQQRQQHQQQHQQHQQHQQHQQHQQHQQHQQQVEEEGVRINWGDEAMWIGEADGGLWPSGGYPPGEAPRRGGRPRKSKNMDSLRSGYLGSTPSRPIWYESYFAHCEKSQRNSFNIFLCLKNVKRIYISQRFKRRIQNGQIYLSKIYDGEKMLGHVKYILEELLNRSLPEIVCLHINDCFVDATISFFISLILLLFKNVNTIKVIRCHIYYSYLSDFLAYQKRNNLRSMHFVCNSILWTRPPDFRSFRGGVHSARQRENFLLYFNTNYVKKGKGWKRWEGRPNSSGDATTGESCRREDSRDTSLKSCLRGRAPPSNGAATGDYRIVVKRGKEVARFGVDEFYDCFVLGGREAKGGREANGGSQPKGEDNQKITPNKSADPQNNSAAPLINSAAPPINSAAPPINSAAPPINSAAPPPTPANAYNIHSGSGSDANTSEDSLKEELQECLCTFPRKRIEEANFWMLKKLKLCSNKLNDDALMYICTLIKKDKLKNLKVLDLRWNNFTYRSLLALSLALTSTTVSEASEGIHCKRRKLHKLLLSGNNIKSPLYSSFLSSFCTCNFIVVRKLDFSMNLIDSDSFAITFKYFRHIFQLQKKKPKKKNNIGNVFINLDHNNLKNSFYINKLAHLLKKFPSKEWQPNGETPVREPNTGGEDARKGVLLSLQYNNIKRGTWGEDPGGTTSRIRF

SEQ ID NO: 192 - protein, 285 aa, Plasmodium vivax
MELLNLKNEENMSVHTMRYSDLQFETNTDISSIEESPFFSVGDFPNELHSSFDDISDYILVDESDLKRERSDITSCESNMIMATKGGGGGGGGGLGGGVMPIKRNTTVKIKKEMKSASYSEESKTASDNTNHDENKKPGLCRTLGTEGRKRMLKLLRKAYKYNEECKVIMKNKNPPLSISYLPYFNLSMLWQLAEDFGVYNEALKIHKECIKKRNANVRFKQSSKNAANYNLSEMNKATKVSKAEYMSDYMCANMDTQTGEDFDTTNTTLNDEGQGKRKRKKSSI

SEQ ID NO: 193 - protein, 380 aa, Plasmodium vivax
MIRRKLYYSLLFLAFLKTFKINQRWSIFISAWYAHEDVDSDYSHSKLYDVLGVHKYASTEEIKKAYRKLSKKYHPDKAKDKNSNNRFSEIAEAYEILGDEEKRKVYDHHGLEAAKNVESNKMEEDPTDHFNIYESFFGGAGGFRREEMKKADSLTLNVEMSLEQLYKGDFFSVIYTRDVNCLRSDDCIMKKKECSGKGYKTVTQQVAPGFIMQNKMRDENCIDRGKAWNQKCSYCPNGMKEEKTIELTLEVEKGMKNNDKIVFEKKGKQEIGHESGDVIFVIQTKKHKVYERKNNDLHQFYEISLKDALIGFSKDIDHISGAPIRINKQTVTFHNEILKVQNKGMPIKDSNKFGDLYIKFLVQFPKYLTEDQKKAISQFL

SEQ ID NO: 194 - protein, 341 aa, Plasmodium vivax
MNAAAIEVINKLKKEDESNNKCFDCGVPNPDWVSVNHGVFLCINCSGVHRSLGVHISIVRSIKMDIFTDEQLKYLDKGGNKKFQTYLENYGINNFIPERKYRTKAAEHYRKIMKSIVHNSDPPSPLSLDEGKDLINFGQNENMNANEINKNGKNNLYADDQQNFIPSLNTAEILDNVSATFSNFINRAQTMTTNTINNLNKNDLIESTKDTLMNSSSWITEKTKKIAENVSDNPWWEKGQSKIKDVTQNATGWISSISSTVSRTNSNFFFANSEFGATGGPTGTGSVSTNASAEGGQGAAAPDHLASTSSSANADGVSKPSAGENNPAFSRTDTSKSLNKN

SEQ ID NO: 195 - protein, 792 aa, Plasmodium vivax
MKELIESVLQLINPDEETEAYLRERINDEKHIIQKKGVEYLYDLVSTFSDEKIKKSTVADIFNKHMKRENNGVGTDEGKNADGQKLAKMVNLKEYWKKNDVVGYYDPFLGIQEKQINYNTSIPISESIRISKEKEKQRQKQLNLFKEWVKNKIKIPSPVRVHNLLHCSDSSKNKTKIEKMYDIRIDNFTLSIGQRSLLTDTTLKINVMNKYGLIGKNGIGKSTLLAKLARYEIEEIKKDISIACIEQDLFLEDVTVLECVLMVDKLRHDLLTELERLELKKSKSALDGGCPNGETQQGDAKQKREEEAVDQEGEGDEKDIDLKILTIYEKLNSINYLEAEKEASKILCGLGFDSNLQKKKVNSLSGGMRMRLCLSRILFSNNDIILLDEPTNHLDIYTIQFLIDYIKKLNKTCIIVSHDRDFLNEVCTDIIHFHQKELTYYSGNYDQFEKTRVEHLLQQQREHDSIEMKKKHVQKFIDRFRCNSKRAALVQSRIKLLNKLPVVNLEKEETPFSFSFLEPFYTSNVLIRLKNISFKNEMFKNLQIKKNANIIIADTVEDPNGKVNGKSHNGTKGEGETTARSDDYQFRHEFLFKNATFEVDMDSRIAICGVNGSGKTTLIKIILNLIDTFEGELHVSNKANIGYYSQYHVDSLNPIFNSIQQLQYNYSNKNIKEEEAIKYFNKFNIPTNVLYEPIYVLSGGQKSKLALAILAYKNPNILILDEPSNHLDIESVQALIVALNLYKGGLIIISHDTYLIKHVADEIYHINNLTKELIKIDYDFDKYAKLLLENKI

SEQ ID NO: 196 - protein, 327 aa, Plasmodium vivax
MKRKYLCGHNRPLTHVNTNYDGDLLFTTGRDKKFILWRLADGNQIGLYECSGAVYNSDVTYDSKRIACSSAANKVYIFDVYTGETLTVMEENGPVRFVEFNKNPLDQSKIVVATDRLKVEHKRFIKLYDLKSNTVVWKQEHESRCIQVRWCFFDKLILSAHENGEIVIWNAEDGHQMRKIQAHSKEVTNMAFDRDRMIMLTSSADGTATLRDAINFEIINEYTADRPLNTCDISPLFKSEHNPKNHIILAGGQAAEHVTTTATGEGKFQTLLYDIIHANELGSIKGHFGTVHSIKFLPHGDGFVSGGEDGFARIYHFDKDYFIGKYD

SEQ ID NO: 197 - protein, 207 aa, Plasmodium vivax
MNEQRSRDYDYLYKIILIGDSGVGKSCILLRFSDDHFTESYITTIGVDFRFRRIKVGDKMVKLQIWDTAGQERFRTITSAYYRGADGIIIIYDTTDRSSFLHIKEWLNEIEKYTSEETCKLLVGNKSDCKDEMEVSTTEGENKAKELNIAFIETSAKDATNVELAFTMITEELIKKKKKKSVSSLGASQSKVKLAAEDHGPGALCSC

SEQ ID NO: 198 - protein, 217 aa, Plasmodium vivax
MSRSKVFFDISIDNKSAGRIVFELFSDITPRTCENFRSLCAGDKVGSKGKNLHYKNSIFHRIIPQFMCQGGDITHGNGSGGESIYGRSFTDENFKMKHDQPGLLSMANAGPNTNSSQFFITLVPCPWLDGKHVVFGKVIEGMNVVRYMEKEGANSGYVKRPVVVTNCGEMKGQDNSADIQHSGGRSSLEGPRFEGKPIPNPLLGLDSTRTGHHHHHH

SEQ ID NO: 199 - protein, 194 aa, Plasmodium vivax
MVSVKTKVLKNNPSDLEKEIAQCLIDIELSSSSDIKNDAKEIKILSCDLIEVEKIKKKTILIYIPYKIYTTYVRKIQRKLINELEKKTKKYVVLVAKRTILKTKQKTKSFKIIPRSRTLTSVYDSILEDIVAPSEIVGKRISMKADGKRLFKIMLDSKERQRDNIEEKLISFAAVYKRITRRDTVFTLPPTNEK

SEQ ID NO: 200 - protein, 316 aa, Plasmodium vivax
MAEHLARIIGTEEDRVNCPFFWKIGACRHGDQCSRSHYKPNSAQTLVIRHMYDNPPMAVAIAEGQMVEDEVLDKAADHFEEFYEEVFEELMKYGEIEDMVVCDNIGDHIIGNVYIKYTHEDYAEKAVKELNGRFYAGKPLQIEYTPVTDFREARCRQFVDGQCRRGGYCNFMHIKHVPRAVKRKLYKRMYKKFPEYKKRRKTKDGSEDGYHDSHRDRGSRDKHRRDKYGDSHHSSRRRNRSRSRSRNRDDADGDSDGASRRHKHPRRENSAERREKIERWNKEREMKNMQRDDDEQDARQEVTVEEQPRGDGPDQS

SEQ ID NO: 201 - protein, 794 aa, Plasmodium vivax
MGRGLTKLLEISLFVGGFLVIWYVTGEKIFRRKKQIVKENILLILRHLCLEIYKVLNETSKTTKSVYDMIKNEPNTSIELNKLEEVLLNNGYKQRIEDVEKEVLNKFDVTVEDFYEELKNYEKDPDVQKVLNSIKKMYHEALLGIQPKLPSIDESISQDVILNLTSLIYKKKRKIYKEKIDSMIKKNQDFNLNTTFSNAEFFNKLQKSTEHVEEQVVRENQNLVPNLFTFKYLVSYYSDDVLFVQRKKYLESKHGEKMIKILKVKKNKKKKKLTKDNLSNGSFQSSGFQNNGLQNNGLQNNSFKSTPSQNSLTDHTSSDRNFFVSPPDKQDHVGDGDELYRSGNHTGAAKDHDATPTYLEMIPPYHPVGELYQGQAQEGEGDLHEGEQHHQEEVHYLEQDPDHHEGEHYLEQEPDHHEEEHYLEQDPHHQEEDQFESAAPPEEPLINSEQSAQHMEADAEEGAAEGGALLGVASPSDGEVSPDGGHGWMHGELSHGEGDHTKIENDAEREDAVQEDAQQDDAEAVGYPDGGAKTEEPSPIKQVDQDGAPDWNAQPEGEEKQDGPVEEAQQESHVEEAQQESHVEEAQQESHVEEAQQESHVDQTEQHNQEAEKSAAEEGGAVNEELAQEEHEPMKGEADEGKGEDEPLPQQEDSGVAAEMVEAVKEGPPAEELPTGELPKEEYTNEEPNNEEPSHEEPSHEEPSHEEPSHEEPSHEEPSHEEPSHEEPSHEEPSHEEPSHEEPSHEEPSHEEPSLEEPSHEDPQNEEPAGGKKPGLGKNSKKKKHAHKDSKKKK

SEQ ID NO: 202 - protein, 174 aa, Plasmodium yoelii
MKNLSILTYTSIRSLTNLYISQVLSNKNWNEIKKTNQEIFNLNNVQDSKNCSNWNSISIDNETESFNKKEKNNETETVTDSFIKKEKQIANINTQIKDNLYNLENKQIYTIGDVSVITELCSSIIDLLTVIFLSKATHFIKHNLYFYIVLSSCHLFFSYKELQYLLASNNELNK

SEQ ID NO: 203 - DNA, 522 bp, Plasmodium yoelii
atgaaaaatttgagtatactaacatatacctcaataagatctttaacgaatttatatataagtcaagtgctctcaaataaaaactggaatgaaataaaaaaaactaatcaagaaatttttaatttaaataatgtccaagatagtaaaaattgttcaaattggaatagtataagcatcgataatgagactgaaagttttaataaaaaagaaaaaaataatgaaactgaaactgttactgattcatttataaaaaaagaaaaacagattgcaaatattaacacccaaattaaagacaatttatataatttagaaaataaacaaatatatactattggggatgttagtgttataacagaattatgttcttcgattattgatttgttaactgtaattttcttatcaaaagccacacattttataaagcataatttatatttctacattgttttatcatcttgtcatttatttttttcgtacaaagagttgcaatatttattagcttcaaacaatgaactaaataaa

SEQ ID NO: 204 - DNA, 519 bp, Plasmodium yoelii
atgaacaggcaaggtaaatatgacatttttcccccaccccttgaaaaaataaataataataataaaacccaagttcccaaaaagtgcccagagaaaacagaaaaaacagaaaaaacagaaaaaacggaaaaaacggaatatcctttcttagtgaatgatgaacgaagtaatataaaacaccaaagtgaaaataaatgttttaacaaaaatgatatggttaatgaaaaaataaataaagttgaccctaacatactaaataaatataataacctaattttaaatactaacgaaataaatttaataataaatgacaatgcaaattttaaagaattattatctaacaatcaagtctcaaactttatgaacgaatatttaactgcccctcttgaagcaattgccaaatataaaaatgataaaactgttattaattttttggaaatattgtttaaatatatgaatgcaaaacaaaagcatatacatttaaataatatttccgaaacattcacttttggcacaaaa

SEQ ID NO: 205 - protein, 297 aa, Plasmodium yoelii
MRDYTDNDSILLKHGWCEMLKGGVIMDVKNVEQAKIAEKAGAIGVMVLENIPSELRNTDGVARSVDPLKIEEIRKCISINVLAKVRIGHFVEAQILEELKVDMLDESEVLTMADEYNHINKHKFKTPFVCGCTNLGEALRRMSEGASMIRTKGEAGTGNIIEAIKHIRTVNNEIKYLCSLDESEVYNFAKKLRAPIDLILLTRKLKRLPVVNFAAGGIATPADAAMCMQLGMDGVFVGSGIFESENPQKMASSIVMAVSNFNNPKILLNVSLGLGKAMHGNTKVSNKWKNKSEEDNS

SEQ ID NO: 206 - DNA, 891 bp, Plasmodium yoelii
atgagagattacacagataatgattccattctacttaaacatggatggtgtgaaatgttaaaagggggagttataatggatgtaaaaaatgtagagcaagcaaaaatagctgaaaaagctggtgcaataggtgtaatggttttagaaaatattccatctgaacttcgaaatactgatggagtagctagaagtgtagacccattgaaaattgaagagataagaaaatgtatttctataaatgtgttagctaaagttagaataggtcattttgttgaagcacaaattttagaagagctcaaagttgatatgcttgacgaaagtgaagtattaactatggcagatgaatataaccatataaataaacataaatttaaaaccccatttgtatgtggatgtacaaatttaggagaagcattaagaagaatgtcagaaggtgcttctatgataagaaccaaaggtgaagctggaactggaaatataattgaagctattaaacatataagaacagtaaataatgaaataaaatatttatgttcattagatgaaagtgaagtatataattttgctaaaaaacttagagcaccaattgatcttatattacttacgagaaaattaaaaagattaccagttgttaattttgctgctggaggaatagctacacctgcagatgctgctatgtgtatgcaattaggaatggatggtgtttttgtaggatcaggaatatttgaaagtgaaaatcctcaaaaaatggcttcatctatagttatggctgtttctaattttaacaaccccaaaatacttttaaatgttagtttagggttaggaaaagccatgcatggaaatacaaaggtatcaaataagtggaaaaataaaagtgaagaagataattca

SEQ ID NO: 207 - protein, 41 aa, Plasmodium yoelii; identical to SEQ ID NO: 107

SEQ ID NO: 208 - protein, 41 aa, Plasmodium yoelii
KHKFKTPFVCGCTNLGEALRRMSEGASMIRTKGEAGTGNII

SEQ ID NO: 209 - protein, 364 aa, Plasmodium yoelii
MMEIPTEEIKFLKKEDVQNIDLNGMSKKERYEIWRRIPKVELHCHLDLTFSAEFFLKWARKYNLQPNMSDDEILDHYLFTKEGESLAEFIRKAISVSDLYRDYDFIEDLAKWAVIEKYKEGVVLMEFRYSPTFVSSSYGLDVELIHKAFIKGIKNATELLNNKIHVALICISDTGHAAASIKHSGDFAIKHKHDFVGFDHGGREIDLKDHKDVYHSVRDHGLHLTVHAGEDATLPNLNTLYTAINILNVERIGHGIRVSESDELIELVKKKDILLEVCPISNLLLNNVKSMDTHPIRKLYDAGVKVSVNSDDPGMFLSNINDNYEKLYIHLNFTLEEFMIMNNWAFEKSFVSDDVKSELKALYF

SEQ ID NO: 210 - DNA, 1092 bp, Plasmodium yoelii
atgatggaaattccaactgaagaaataaagttcctcaaaaaggaagatgtacaaaacatcgatttaaacggaatgagtaaaaaagaaagatatgaaatatggagaagaattcccaaagttgaattacattgccatttagatttaacattttctgctgaattttttttaaaatgggctcgaaaatataatctacaacctaacatgtcagatgacgaaatacttgatcattatttatttacaaaagaaggagaatcattagcagaatttattagaaaagcaataagtgtttctgatttatatagagattatgattttattgaagatttggccaaatgggcagttattgaaaaatataaagaaggtgttgttttaatggaatttcgatattcaccaacttttgtttcttcatcttatggattagatgtagaattgattcataaagcatttataaaaggaataaaaaatgctacagaattattaaacaataaaatacatgttgcattaatatgtattagtgatactggacatgctgctgctagtattaaacattctggagattttgcaattaaacataaacatgatttcgttggttttgatcatggtggacgtgaaatagatttaaaagatcataaagatgtatatcattcagttagggatcatggtttacatctaactgtacatgcaggtgaagatgcaactttaccaaatctaaatactttatatactgctatcaatattttaaatgttgaacgtattggtcatggtataagagtttcagaatcagatgaactaattgaattagttaaaaaaaaagatatcttattagaagtatgcccaatatctaatcttttattaaataatgttaaatctatggatacacatccaattagaaaattatatgatgctggtgttaaagtatctgttaattccgatgatcctggaatgtttttatcaaacataaatgataattacgaaaaattatatatccatctaaattttacattagaagaatttatgattatgaataactgggcttttgaaaaatctttcgttagtgacgatgttaaaagcgagcttaaagcgttgtacttt

SEQ ID NO: 211 - protein, 24 aa, Plasmodium yoelii
KDAGYQPPLDEKYVKEMSPEEIVN

SEQ ID NO: 212 - protein, 24 aa, Plasmodium yoelii
KDAGYQPPLDEKYVKEMTPEEIVN

SEQ ID NO: 213 - protein, 798 aa, Plasmodium yoelii
MGAYLSAPKTNKESMDGGNLEIDPSRYGLSCMQGWRKNMEDSHICYNNIKVNEIEEVISIYGVFDGHGGPNVSKWISYNFYRIFVKCIKEASDEMKKDNLDKSENYKLKLIKLTLEKTFLKLDEEMLLTENQEKLKKYNASAQETEESDTRENYLYSILNDIISKNISIKAVEKDGKRCLQVVYNKEGNPVEEGSAETPSTSLIEDDYNNKTEELYDEDDSILKDNMNGDDKELEIKENDSEKKNDDNNFKKIDTTTGEVNSNDNIKGIKLEKDEKSEDNTNKIKIEDSDNTNKEQNDLQNKCKSEVNSVDTDTSNLGQDIKNEIKEDNNGSTEINTKRLKKDMNNETDNNIKEEDAINNNIKTEDVKPSALTYDNLKSLGEMTEPEDKLKGNYSNSNDVINDILNSCDDDNSLDLYGKDNIGEGFSYNETITNVIDNNINNNNNNENNNNNNENNNNENNSNENNETNDNNDLYSPDELRLFENYYSNDYEDNIAYSCGSTAIVAVIIKGYLIVANAGDSRAIICFNGNSLGMSTDHKPHLQAEEARIKKAGGYISNGRVDGNLNLTRAIGDLHYKRDPFLSQKDQKISAFPEVTCVTLTPDDEFLFLACDGIWDCKDGQDVVGFVKTRLEKFEELPDNSADLGGNQNTNSEHINSNNNTTNNENSTLKDEANASNNAENGQISNSYDKNINNNNSNIENEDNSNENQNNFNENNDNNFEKDTNGKYDDSPIIERKKYDKFNKLSQICEELCDDCLSNNYKENDGIGCDNMTCLIVQYNPLYKMHTEKKFLNIDDIE

SEQ ID NO: 214 - protein, 924 aa, Plasmodium falciparum
MGAYLSSPKTNKESLDGGNLELDPSRYGLSCMQGWRKNMEDAHICYNNLKFNEIEEDVSIYGVFDGHGGPNVSKWISYNFRRIFIRCLKEANEEMIKKNMKRSENYKLKLIKLTLEKTFLKLDEEMLLSENQEKLKKYSVPTQEDEEESDTRENYIYSILNDIISKNISIKAIEKDGKRCLQVVYNKDGSPVEEGNTDGSATSTLNQDQPEHNQLYEDGNDNNNSNNNNNNNNNNISPNLYGTNGENILRSDENYDSSNLNLGDNQDRKNYDDIENLGDNNNSSNDMLKKDDASSDILTATTSTNDMKDEDKKNNYLVEKNEHMKKENNNCEENSEQNKQVNGMSSYNKALIEGAMGESIDEKGLLNLNDIKTNNILIDNNNDSNNNNNNNNNNNNSSSNDPSMFSTAYAHHCNNNEGTIGDYLNNEENNETNNIKRLKKDICNDEKGNTQNDIKEEDKMRNMETYMNEPIDGVKSELTYDNLKSMEEQEKNGEIEQGINNMIDHFQSNNLLNNDNTNGNINSYTNDDIHNNGSLQGYEQDGLIQNRNNGDEVNNSDIERLAYDEASANVIDNNINNDIHEEDEDDENNNNDEETGEDDCNGVYSSEELRLFENYYSNDYEDNIAYSCGSTALVAVILKGYLIVANAGDSRAIVCFNGNSLGMSTDHKPHLQTEEARIKKAGGYIANGRVDGNLNLTRAIGDLHYKRDPFLPQKDQKISAFPEITCVTLTPEDEFLFLACDGIWDCKDGQDVVGFVKTRLEKFEEIPDDPNNSLDNTENSEHMNTNNNSDQNEKLKSEDQNNINNEQENILNTSNNDFQKNENLLNENNMDNINMQEKSETEEDLDLERDEDKHDAPPVIERKKYEKFNKLSQICEELCDECLSNNYKENDGIGCDNMTCLIVQYNPEYKIHTEKKFLNIDDIE

SEQ ID NO: 215 - protein, 872 aa, Plasmodium vivax
MGAYLSAPKTNKESLDGGNLELDPSRYGLSCMQGWRKNMEDSHICYNNLKLNEIEEDVSIYGVFDGHGGPNVSKWISYNFRRIFLRCIKEASEELTKKNLDKSKNYKLKLIKLTLEKTFLKLDEEMLLTENQEKLKKYSVPTQENEEESDTRENYLYSILNDIISKNISIKAIEKDGKRCLQVVYNKDGNPVEEGNAESSTTLADEENNKSPDLIGSTDSIVKEEDEEEDNEDDEDGDEAAEKEAAKEEGANKDAVKKESCKEGGSAQEGNNKTLKKDDEISEGLTADGGEEKGALKGEIEKGEKTEDDEEQNSGSTEEKTDAEEKNKEANVAEGKPEVDTNKAISTGSGGENKGKAKDEDGKEHADGYADNGESAETNAKRLKKGMNDYSGNEKESNHEEDLSDGASGSTCEPVVKAELTYDNLKCMEEAAAKEAKNNGANGNLPGFDESALRIYEKGSSSSEEGFSYDEAVTNVIDNNISSNTDASNEADDCNGLYSSDELRLFENYYSNDYEDNIAYSCGSTALVAVILKGYLIVANAGDSRAIVCFNGNSLGMSTDHKPHLQEEEARIKKAGGYISNGRVDGNLNLTRAIGDLHYKRDPFLPQKDQKISAFPEVTCVTLTPEDEFLFLACDGIWDCKDGQDVVGFVKTRLEKFEEPTSDETVIDSTDNTNENATTTITTNENIVNSMGSEEKDKSKELEQNEVSKEKKNAEGAGAGPSIGKDKHNKTTAKGTNSNDEGVENGSEKKKTKEEGGLSEDAHGEDDDEEDDEDDEDEESASRMRTHDGLEMDRYDEDDTKFDSAPVIVRKKFEKFNKLSQICEELCDECLSNNYKENDGIGCDNMTCLIVQYNPIYKIHTEKKFLNIDDIE

SEQ ID NO: 216 - protein, 207 aa, Plasmodium yoelii
MGQFKHHKKNFKKNYDNDFKMGKIILGGTYYKSCENDLVIKNALENLVPYFNGRIFLENKEEIGKVEEVLGPINEFYFSVKLKEGILAKSFSSDTKFYIDESQTLPLSRFLPQDKSAEKKNPKKKKTNRDKKKNGNNNVNTNFNKQNKFGSGGKNRNDRNDRNNWNNSGGNKFGGNNFGGGNRNKGNNNFKNRSNSGRKFGNQRGRF

SEQ ID NO: 217 - protein, 209 aa, Plasmodium falciparum
MGFFKKNKRQSFNRNYEGEVQCNNIILGGTFYKHCENDLLLKNELENLVPYFNGRIFLENKEEIGKVDEILGPINEFYFSVKLKEGIRAKSFSSDTHFFIDKSQTLPLSRFLPQEKNSQSLVKKKKKKSNRDKKKNSFNQNNKKPNNYNFKGNNNRNDHNNRNDHNNRNDHNNRNDHNNRNDRNNRNNKNSFRNRSNSSRKFNNQRGRF

SEQ ID NO: 218 - protein, 197 aa, Plasmodium vivax
MGFFKKNRKGSFNRGQESEMKFDKIILGGTFYKHCENDLVIKNKLENLVPYFNGRIFLENKEEIGKVDEILGPINEFYFSVKLKEGIHAKSFSTDTKFFIDQSQTLPLSRFLPQEKKITHQPKKKKRSNREKKQNNMTPNVKKPNNFTFRGNHKNDRGGRNDNNQFKRNSGNFRNDRNNFKNRPNSGRKFGNQRGRF

SEQ ID NO: 219 - protein, 450 aa, Plasmodium yoelii
MNVENIFENEQVNIEEIEVLSNSEIRTRISLIDTEIKILKNEHTRLKNEYKNIQEKIKDNVEKIHLNKMLPYLVANVVESLDLQDEEDEQEPKDEYDLYDNPNNNNNSYGNISKNAPEEGFRDIDDEKKGKCMVIKTSTRQTIFLPVPGLIEASELKPGDLVGVNKDSYLIIDKLPPEYDNRVKAMEVIEKPTEDYSDIGGLDKQIEDLVEAIVLPMLHKEKFEKIGIKPPKGVLMHGPPGTGKTLLARACASQTNATFLKLAGPQLVQMFIGDGAKMVRDAFNLAKEKAPAIIFIDELDAIGTKRFDSELSGDREVQRTMLELLNQLDGFSTDETVKVIAATNRPDTLDPALLRSGRLDRKIELPHPNEESRARILQIHSRKMNVHKDVNFEELARSTDDFNGAQLKAVCVEAGMIALRRGATEIDHEDFIEGITSVLSKKKSTLNYFT

SEQ ID NO: 220 - protein, 439 aa, Plasmodium falciparum
MNVENIFGNEEVNVEEIEKLSNSEIKTRVSLIDTEIKILKNEHARLKNEYKNLQEKIKDNVEKIHLNKMLPYLVANVVESLDLEDEEEENEIKDEYDLYDNNLKLSHEGFRDIDDEKRGKCMVIKTSTRQTIFLPVPGLIDASELKPGDLVGVNKDSYLIIDKLPQEYDNRVKAMEVIEKPSEDYSDIGGLDKQIEDLVEAIVLPMLHKEKFEKIGIKPPKGVLMHGPPGTGKTLLARACASQTNATFLKLAGPQLVQMFIGDGAKMVRDAFNLAKEKAPAIIFIDELDAIGTKRFDSELSGDREVQRTMLELLNQLDGFSTDDTVKVIAATNRPDTLDPALLRSGRLDRKIELPHPNEESRARILQIHSRKMNVHKDVNFEELARSTDDFNGAQLKAVCVEAGMIALRRGATEIDHEDFVEGITSVLSKKKSTLNYFT

SEQ ID NO: 221 - protein, 441 aa, Plasmodium vivax
MNVENIFPNSDVNVEEIEKLTNAEIKTRISLIDTEIKILKNEHTRLKNEYKSLQEKIKDNVEKIHLNKMLPYLVANVVESLDLDDDEESNEPKDEYDLYVDNSKGGNNDQGFRDIDDEKRGKCMVIKTSTRQTIFLPVPGLIEASELKPGDLVGVNKDSYLIIDKLPPEYDNRVKAMEVIEKPSEDYSDIGGLDKQIEDLVEAIVLPMLHKEKFEKIGIKPPKGVLMHGPPGTGKTLLARACASQTNATFLKLAGPQLVQMFIGDGAKMVRDAFNLAKEKAPAIIFIDELDAIGTKRFDSELSGDREVQRTMLELLNQLDGFSTDDTVKVIAATNRPDTLDPALLRSGRLDRKIELPHPNEESRARILQIHSRKMNVHKDVNFEELARSTDDFNGAQLKAVCVEAGMIALRRGATEIDHEDFVEGITSVLSKKKSTLNYFT

SEQ ID NO: 222 - protein, 189 aa, Plasmodium yoelii
MSMKKKALVVVASGSEDVEYITTVDVLRRANIDVTTASIHETEKVQLQSKNTVFADTIIDKVKNDIFDVIIIPGGMKGSNAISDCQVVIEMLRDQKKNNRLYAAICAAPALVLHRHSLIDDVEAVAYPSFESDFKHIGKGRVCVSKNCVTSLGPGTAVEFALKIVELLLDRESALRLASGFLLHPSITF

SEQ ID NO: 223 - protein, 189 aa, Plasmodium falciparum
MSGKKTALVAVASGSEDVEYITVVDVLRRAGVHVTTASVEKSEQVCLQSKNVVLADTTISKVRNNIYDVLVIPGGMKGSNTISECSEFIDMLKEQKANNRLYAAICAAPETVLDRHSLIDDVEAVAYPSFERNFKHIGKGRVCVSKNCITSVGPGSAVEFGLKIVEHLLGRQVALSLASGFLLHPAVTF

SEQ ID NO: 224 - protein, 189 aa, Plasmodium vivax
MSGKKTALVVVASGSEDVEYITTVDVLRRANISVTTASVEETEKVCLQSKNVVIADTTIDKVKDNTFDVIVIPGGMKGSNAISNCPTVIEMLKVQKSSNKFYAAICAAPETVLHRHSLIDDVEAVAYPSFESDFKHIGKGRVCVSKNCITSVGPGSAVEFALKIVEMLLSRDAALNLASGFLLHPSVTF

SEQ ID NO: 225 - protein, 193 aa, Plasmodium yoelii
  misc_feature (18)..(18): Xaa can be any naturally occurring amino acid
MHIEFGNIYIFFFFLYYXVLNMADEFTDDIGVFSKKLLEPVPFVRTNNCIKDVDAELFISAYAKYLKLHNKITFPKWCNFVKTGKGRKLAPLDEDWYFIKTSSILRRLYIHPDIGVGFLRRQFSYKQRRGVAPNHTSLASGKILRSILQQLENIGYVEQNPKKKGRRLTTKGENAINNFARYINKKVYKLEKQ

SEQ ID NO: 226 - protein, 170 aa, Plasmodium falciparum
MAEQFTEDIGVVNKRLLEPVPFVKTNNCIKDVDADLFIRSYATHLKLHNKITYPKWCTFVKTGKGRKLAPLNEDWYFIRASSILRRLYLHPDIGVGFLRRQFSSKQRRGVAPNHTSLASGKILRSILQQLENLGYVEQNPKKKGRRLTTKGENAINNFARYINKKVYNKE

SEQ ID NO: 227 - protein, 172 aa, Plasmodium vivax
MAEEFTEDIGVVNKRLLEPVPFVRTNNCIKDVDSELFIKAYASYLKLHNKITFPKWCNFVKTGKGRKLAPLNEDWYFVKASSILRKLYLSPDIGVGFLRRHYSYKQRRGVAPNHTSLASGKILRSILQQLENLGYVEQNPKKKGRRLTTKGENAINNFARYINKKVYKLDKE

SEQ ID NO: 228 - protein, 796 aa, Plasmodium yoelii
MFLQRILHNLASCKITTVYKIKQVKRIKKKYYIQNFHTFRKNIIIKPKRKVNYVFFSNKPTDIKMNINDSENIEKQIEKISQEISLLIERNESIKIINDDPDIKKEYENNQNLLKEKKKTLNELCSIFSQPLNLVENRSKLESLIKRRLFYTNSFEIYGGVSGLIDYGPSGCLLKYELEKLWRNHFVFYDEMLEIKGTCITPYSVLKTSGHVDRFTDLMIKDIVTKDCYRADKYLSEWLKNKLDEIKDQKNDGNEKREKNFDNSENINNVQTIQEIESILRRLDGMNENEIKDVIKKYNIKSPEKNDLSDPFPFNLMFQTKIGPKENNENDTIEKNINDMNKNNIAFLRPETAQGIFVNFKKLLEYNGGKMPFAGAQIGLGFRNEISPRNGLLRVREFEMGEIEYFFNPEKSKHEKYDLYKHLVLPLYPRTNQLNDNGNVITNMSLEEAVNNGIICNEALAYFLARTYLFLLKCGIKKDGIRYRQHLEKEMAHYANDCWDAEILTSYGYIECVGHADRSAYDLKHHMNATGSNLYGCQKYDKPVDVEFVKIIPNKAKIGMKFKSDQNKIYKILNEKTNEDLLIIEQELNKNQTYILKGYSDQSNDNNNDSFELTRDMISFQKYTKKVQESNFIPNVIEPSFGIGRLIFCILEHSFRVRQFTDDKEERHYLSLPYALSPIKCSVLSISNNKEFYPYIKQIQTILSENNISCKLDNSSVSIGKKYARIDEIGIPFAVTIDFQTLKDKTITLRDRDSMLQIRVNISEVSDIINSLLSQKSSWSDYVQKYGLFIQQNLEN

SEQ ID NO: 229 - protein, 889 aa, Plasmodium falciparum
MIIIVIFLLSMFFFENKTYCFISKINIKNLRHNKNNNNKYHLFASRELRKISSFVLDNRILFNKQKIRKRKFNFFNVYSNKMSDMDNIKEQKENDGCGSLEELIERYVCEISSLIERNECIKGIDDEDLKKEFMENEKLLQDKKMKLKDLYGKPSEELKLVENRTKLENLVKRKFFYTNSFEIYGGASGLFDYGPSGCLLKSELENLWRCHFIYYDEMLEISGSCVTPYQVLKTSGHVDRFTDLMIRDVVTNDCYRADKYLGDFLKAKIEELRKKNTKGDEHVDEKEKKQKRDDDINENKENNKNNENNKNDENNENNKNDENNKNNDNNNNNNNSCNYNCDMVGGLHNGNERLIQKIELILRKLDGMNEEEIKEIIKEYNIKSPLKNDLSEPFPFNLMFQTKIGPKDDNTEDKNKEKCKNVSNNKNLNSTNTNNNMNNVAFLRPETAQGIFVNFKKLLEYNGGKTPFAGAQLGLGFRNEISPRNGLLRVREFQMAEIEYFVNPKKKNHEKYYLFKYLMLPLYPRDNQLTDGVVIKNMTLEEAVEKNIIANEALAYFLARTYLFLLKCGINKDGIRFRQHLKTEMAHYANDCWDAEILTSFGFIEVVGHADRSAYDLQHHMKYTGANLYACEKYNEPIEVEYVKMIPNKAKIGHTFKSEQNKIYACLNEKSNEELLIIDEELSKNNKYILNISNNDSINNECKYELTRDMLSFQKYKKKVQEENFIPNVIEPSFGIGRLIFCILEHSFRIRRFTDDKEERQYLSLPYKLAPIKCSILSISNNKAFYPYIKQIQMLLNQYNISSKIDNSSVSIGKKYARTDEIGIPFAVTIDFQTLKDKTITLRERDSMLQIRISMSHLVDIINSMLHAKKNWNEYIAQYGLFTQQVLDS

SEQ ID NO: 230 - protein, 842 aa, Plasmodium vivax
MRLLGTLLILVPLQVKARCDVLSRVNSKLRRAPLSTVRAKRHSRAAYIVHSPVPKESRRRYSLVGRRVSDHLRSAHPGSAPLRSMEQSHSSAIGSANGPAAADTSRIEEQIERCSQEISALVERNECIRGLNDEELKKEHDANEKSLEEKKRKLKRLYTLPSEPLNLAKNRTKVDNLAKRKLFYTNSFEIYGGSSGLIDYGPSGCLLKSELETLWRYHFIFYDEMLEICGTCITPYNVLKTSGHVDRFTDLMIRDAVTGEFFRADKYIAEWLTSRAEAVKKQEGEQAGDKRDHPLQEQPPHQVASQPHSAEQMMGVVRRLDGMSEQEIKDVIQQYEIKSPAKNEFVGPFPFNLMFQTKIGPKEDAEDASAQRGQPSGSPPSPTDVSYLNSVAFLRPETAQGIFVNFKKLLEYNGGKMPFAGAQIGLGFRNEISPRNGLLRVREFEMAEIEYFVNPERKCHEKYPLFKHLVLPLYPREEQLASGEHSRVVHMEIDEAVTKGIIANEALAYFLARTYLFLLKCGINKDGLRFRQHLPTEMAHYANDCWDAEILTSYGFIEVVGHADRSAYDLKNHIKVTGANLYACEKYDSPVEEEHIKISPNKAKIGMKFKSQQSVIYQWLNERTTEELLAIDEELNRKNSYVVSISPSGASSPPSSFELSRDMVKFEKFKKKVQEKNFIPNVIEPSFGIGRLIFCIIEHSFRTRTFADEKEERHYLSLPYALAPVKCSVLTISNNKTFVPFVKQIQMILNEISISSKIDTSSVSIGKKYARTDEIGIPFAVTIDFQTLKDKTVTLRERDSMLQVRLGLSELPGAVTALLRQKKTWAELVAQCGLFTQQNLDP

SEQ ID NO: 231 - protein, 670 aa, Plasmodium yoelii
MNTEIDIKCVNEIRMLAAELPLEANSGHQGAPIGCAPIAHILWGYVMNYYNEDTEWINRDRFVLSNGHTSSLLYTMLYLTEQGLNLDDLKKFRQLGSLTPGHPENYITKGVEVTTGPLGQGAANAVGMAICAHNLSEKYNTNDFEIFNNYIYALCGDGCMQEGVFCEAASLAGHLGLGRLILIYDDNKITIDGNTELSFTEDIGKKFESFNWEVKIVKDGNTDFEKIYKEIEECKKNLKQPSLIIVQTLSGFGTKVEGSHKSHGLALKDDDIKNAKKNLGLDSEKKFHISDKVKNFYKNVLQKNKENYMKWKETFDKYMLKYPEKGQEILRRFKKELPNNWENVLPKYTVSDSPLATRNLSGIALNCINKILPELIGGSADLTESNCTALKDEKDITKNSFANKYIRYGVREHGMVAISNGIYAYGGFEPFCGTFLNFYTYAFGALRLSALSNHHVLCIATHDSIELGEDGPTHQPIEVLALLRATPNINIIRPADGNEVSGSYLCHFKNSKTPTVLALCRNKVPHLKNTSAEGVLKGAYILEDFENNNDKQKVILSGCGSELHLCFEAKDILKSKHNLNVRIVSFPSWTMFKKQTKEYQTSIMMHNDPKIVRFYIEPASTFGFDTYFNTYIGLDQFGYSAPKNQIWNHLGFTSDNIVKKVLDFIQNQLN

SEQ ID NO: 232 - protein, 672 aa, Plasmodium falciparum
MNIMDNEIDTKCINEIRMLSAELPLEAKSGHQGAPIGCAPIAHILWSYVMNYYNEDTKWINRDRFILSNGHASALLYTMLYLTEQGLSMEDLKSFRQFGSLTPGHPENHITKGVEVTTGPLGQGASNAVGMAIAAHNLADKYNTEEHKIFDNYVYAICGDGCMQEGVFCEAASLAGHLGLGRLILLYDDNKITIDGNTDLSFTENIEKKFEALNWEVRRVEDGNKDYKKILHEIEQGKKNLQQPTLIIVRTACGFGTKVEGTCKSHGLALNDEDLKNAKSFFGLDPQKKFHISDEVKEFYKNVIQKKKENYIKWKNMFDDFSLKYPQVSQEIIRRFQNDLPNNWKDALPKYTPKDAPGATRNLSGIVLNSINKIFPELIGGSADLSESNCTSLKEENDIKKNSYGNKYIRFGVREHGMVAITNGLYAYGGFKPYCGTFLNFYTYAFGALRLAALSNHHILCIATHDSVELGEDGPTHQPIEVLSLLRSTPNLNIIRPADGNEVSGAYLSHFSNPHTPTVIALCRNKVPHLNNTQPEQVLKGAYILEDFDTSNNPKVILTGSGSELHLCFEAKEILKNQHQLNVRIVSFPSWTLFKKQPEDYQYSVMMHNHPNLPRFYIEPASTHGFDTYFNVYIGINQFGYSAPKNKIWEHLGFTPENIVQKVLAFMKNKLK

SEQ ID NO: 233 - protein, 670 aa, Plasmodium vivax
MNGEIDEKCINEIRMLSAELPLKANSGHQGAPIGCAPIAHILWAYVMNYYNEDTSWMNRDRFVLSNGHASALLYTMLYLTKQGLTMEDLKNFRQLESLTPGHPEKHITKGVEVTTGPLGQGASNAVGMAICAHNLAQKYNTQEFPIFNNYVYAICGDGCMQEGVFCEAASLAGHLGVGRLILLYDDNKITIDGNTELSFTEDIEKKFEGLKWEVRKVPNGNTDFAGILTQIEEAKKNTKQPSLIIVQTACGYGTKVEGTCKSHGLALKEEDLKKTKELFGLDPEKQFHISEEVKNFYENIVEKKKENYLKWKKMFCDFTVKYPETAQEIMRRFSKELPHNWVEVLPKYTTSDAPGATRNLSGVALNCINKILPELIGGSADLTESNCTALKEEKDITRDSFANKYIRYGVREHGMVAITNGISAYGGFEPFCATFLNFYTYAFGALRLAALSQYHIFCIATHDSVELGEDGPTHQPIEVLALLRATPNLNVIRPADGNEVSGAYLCHFKNLKTPTLVALCRNKVPHLKNTSAEQVLKGAYVLEDFNNSNDKQKVILAGCGSELHLCFEAKSILTEQHNLNVRIVSFPSWNLFQQQSEEYQQSVMMHHDAKVVRFYIEPASTHGFDTYFNVYLGINQFGYSAPKNQIWEHLGFTPENIVRKVLAFIEAHLG

SEQ ID NO: 234 - protein, 576 aa, Plasmodium yoelii
MAIEVDEETLKIAKEFQKKNEEEIKSKKLKPETIQLDSPSSNLIKINEASCRGRIKISNLLNAPISETEYNNKDKIEKNKYIDQLVVVCGWSKAVRKQGGGRFCFVNLNDGSCHLNLQIVVNQNIDNYDKLLKCGIGCCFRFTGTLILSPVQNTEKKGLLNQNVELTLTDNSIHSFEIYGENLDPQKYPLSKKNHGKEFLREVAHLRPRSYFISSVMRIRNALMLSTHLFFQSRGFICIQTPLITTSDCEGGGEMFTVTTLFNEEGDINSIPKTKKKINNNQIVKREDQNTNELETNNNTNQYIVDFKKDFFSKQAFLTVSGQLSLENLCSSMGDVYTFGPTFRAENSHTSRHLAEFWMIEPEMAFADIYDNMEVAEAYIKYCIRYVLNNNFHDIYYFEENVEKGLIDRLKNILNDNFAKITYTNAIDLLTKYSNNFEVPIKWGMDLQSEHERFISEQIFKKPVIVYNYPKDLKAFYMKLNDDNKTVAAMDVLVPKIGEVIGGSQREDNLELLDKMINEKKLNIESYWWYRQLRKYGTHPHSGFGLGFERLIMLVTGVDNIKDTIPFPRYHGHAEF

SEQ ID NO: 235 - protein, 722 aa, Plasmodium falciparum
MRIYFITLIYFFTLLFLLTKCIKNKNRNKISNISCTYNLSRIRNRPVLTTGTKRRKLRNNFFFLNNYRKMISLCNKIDIKKRFLLPKLQGKYNLYCTTKNVERTRIKDLFKMDIKEAQHKNFKICGWIKSVRTVGKSYFVFVDINDGSYYKNLQVIIDDKIPDYEYILKTSTDDAIECFGELKGSIGKKQNVELCVYDISKNHYIKLFKQMNQDTVEEKEKINDSGNEKDNHNFNSNGHVNNYNDSNNNNNNNNNNYNNNNHVNNYHDSNNINDNIIFTKNSSGHINEDNKTKGAKHNKEDYYVISKKYHTKQYLRNYPHLRARTKLYSSLFRLKSDIIFETFNFLKKKKNYTYINTPILTSNDCEGAGKLFYATTLFDQQIKNEQREEDHMKKGITNEIAGNIKEKCYYQNEHLEYISRHKSISKMEGFDEMLLKNVSSNDCISPNNTESYNTRFENDFFKKACYLNVSSQLSLECLCCSIGDVFTLNPSFRAENSNTFRHLSEFLMLEVELAFSNLKDIIDISEEYIKEMITYALYKSEDVNYLNEYHDKDLKNKLENILNKKFVLITYDEAINILKKENVFYDFQWGKDFSFEEQKYLATNYFKAPVVIINYPTHIKPFYMKLNEDEKTVSCMDIIFPDVGEVVGGSEREINLKNLKKQMENKKLNMKLYDPYIQLRKHGNIPHAGFGIGMDRLIMFLSSINNIRDVVTFPRYPGSLFM

SEQ ID NO: 236 - protein, 759 aa, Plasmodium vivax
MGATFSRLALSTTLLGLLARGVHRGEGRAEASALALQLCGQRGRRRRAGRRAEAYGGRAARRTEAYGGRTTRRTATSGGTTRRTTPGGTPLMRGAFIFKGNAHHSWCISRGTPNALGWSTPPVRRRFFAKVRGGSGSQGGGHDGAHPGGAPNESASVAPHPGGAPHESASVAPHPGGASNEGTSSELLPGEASNERTGRTKIKDILRAQGTHSEGETCTICGWVKSVRTVGKNRFSFIDVNDGSHVKNLQVVVDAGIPNYGEVSRVLTDDAVECSGELKCSLGKKQRVELCVRDAARAHYVRLLGRGEGARSGGGSGGGSEGGSADGEGEKRDDGEGDRRDDGEGDRRDDGEGDRRGKHYAIAKKYHSKEHLRSFPHLRARTKLYSCVFRLKSDVVAETFKFWRERNCTYINTPVLTSNDCEGAGELFHATTLMSRRGSGGGGEANGSDGSGGASGIDQRDERPGEPVKGDPPFCRDFFKKPCYLNVSSQLALECLCCSMGDVFTLNQSFRAEQSNTVRHLSEFLMMEVELAFSNLTSIISLAEEYIKTMVKFALHQSEDVDYIHEHHDRTLKEKLQAVLQKPFAVVTYDEAMQIVKRHVGRVGVAVDPHVAARTDVSQRGGAPPPRADLTFEEQRFLTEVHFRSPVVVVNYPQEIKPFYMALNADGKTVACMDVLLPHVGEVVGGSEREIRIHTLERRMKEKRLDLRLYEPYLQLRRQGNVPHAGFGLGVDRLIMFLTSMSNIRDVVPFPRAPGSLFM

SEQ ID NO: 237 - protein, 142 aa, Plasmodium yoelii
  misc_feature (10)..(10): Xaa can be any naturally occurring amino acid
MHEHITTVYXVILFFYFIFFFYAAFKNMNNHAPLQIASRRNEKTSFRNNDSFMEKKKSRTSLNSTFDEIKGIISKQLSVEEDKIQLNSSFTKDLGADSLDQVELIMALEEHFKITISDQDALKINTVEEAIDFIEKNKKPDA

SEQ ID NO: 238 - protein, 137 aa, Plasmodium falciparum
MKILLLCIIFLYYVNAFKNTQKDGVSLQILKKKRSNQVNFLNRKNDYNLIKNKNPSSSLKSTFDDIKKIISKQLSVEEDKIQMNSNFTKDLGADSLDLVELIMALEEKFNVTISDQDALKINTVQDAIDYIEKNNKQ

SEQ ID NO: 239 - protein, 138 aa, Plasmodium vivax
MMKAILLWFLFVCGVFAFRQSGNNPLCQQSGNRKGRLSYRKTTGGQGATGRRGSAYSLGSTFDDIKKIISKQLSVEEDKIQMESNFTKDLGADSLDIVELIMALEEKFNITISDQDALKISTVQDAIDFIEKNKKSDA

SEQ ID NO: 240 - protein, 227 aa, Plasmodium yoelii
MESDKLKELHEDIEELKTILSKAVRENVKRKISRVIEDMTVEIAKLKLDEFQKPNKINITNSEKNDNNISYSSVPSFAWNQEKNKVTVFLTIKNIQNINKENIISEFNERDFEIKIHNLDLKNYRFCIKKLYDKIIPNKCSIKIKKDLIQVYLIKQDNKHWDNLHFKESPMSKIKPPKINDQSEPSAMLMDMMKQLYQEGDSDMKRTIAKAWCEANEKKNDFVPPAF

SEQ ID NO: 241 - protein, 228 aa, Plasmodium falciparum
MTTEEKINNLNDDLEELNTLLLSVKRENVKAKIQECIENINGEIIKLKINKNQMPNKITETKVQLNDPIVSYNSVQSFAWNQERNKVTIFLTVKNVHTVGEEKISTVFEERSFEIKMNDVDKKHYRFCIKKLCDKIIPNKCSFKVKKDSVHVTLVKQENKHWENLHFKESPMSKIKPPSMDEQAEPSAMLMNMMKQLYQEGDSDMKRTIAKAWCEANEKKSDFSVPNF

SEQ ID NO: 242 - protein, 227 aa, Plasmodium vivax
MESPQVAELNEDIVELNKLLAQAVRENVKEKIKKCIENTTVEIAKLKLEESQTPNKITEKNTPLNDSNISYNSVQSFAWNQEGNKVTVFLTVKDIHTIDKEKISAEFNERNFEVKMHQVNKKNYRFCVKKLHEKIVPGKCSFKVKKDALHVYLIKQDQKYWDNLHFKESPMSKIRAPKMDEQAEPSTMLMNMMKQLYQEGDSDMKRTIAKAWCEANEKKSDFSVPNF

SEQ ID NO: 243 - protein, 501 aa, Plasmodium yoelii
MNIILSIDQSTQSTKLIFFDEELKVLHMNSLNHEQKCFKPGWYEHDPEEIIENLYKLMNEGINVLKEKYKTVVIKCIGITNQRETVIIWDKETGKPLYNAIVWLDTRVESLVTEFSKKYNNDYFQKKTGTYFNTYFSAFKILWLIKNNKTIKEKVKNGTAMIGNINTWLIYNLTKGNCYTDVTNASRTLLMDINTLQWDPEMCKMFGITNMSALPEIKCNCYNFGLVKSEKVPDYSNVPITGCIGDQQSACIGQAIFDEGEAKCTYGTGVFLLVNTGNKIVYSSCGLITTVCYKFNDDDKPNYALEGSIGTAGSGVSWLENVNLIKDTSEVNEIMETCKDTEGVVFVPAFGGLFAPRWRSDARACISGMSFNTSKAHIVRALLEGIVFQLSEIVNSLTSDMNIEMIHLLRCDGGMTKNKAFMQFNADILNTNIEVSKYKEVTALGAAVLAGLGIKLWKDLDSVKSLIRNKEYTFNSNMDAKSRSKKIKEWNKAVNKELLES

SEQ ID NO: 244 - protein, 501 aa, Plasmodium falciparum
MNVILSIDQSTQSTKVFFYDEELNIVHSNNLNHEQKCLKPGWYEHDPIEIMTNLYNLMNEGIKVLKDKYTSVIIKCIGITNQRETVIIWDRITGKPLYNAIVWLDTRVEELVTEFSAKYNNNDIQKKTGTYFNTYFSAFKILWLIQNNPEIKQKIDDGTAVIGNINTWLIFNLTKGNCYTDVTNASRTLLMDINTLQWDEKMCKIFNITNMSVLPEIKSNCSNFGLVKSEHVPDYLNIPITGCIGDQQSACIGQAIFDEGEAKCTYGTGVFLLINTGEKVVYSTCGLITTICYKFNDNDKPKYALEGSIGTAGSGVSWLLKNKLIDDPSEASDIMEKCENTTGVIFVPAFSGLYAPRWRSDARASIYGMTFNTERSHIVRALLEGIAFQLNEIVDSLTSDMGIEMLHVLRCDGGMTKNKPFMQFNSDIINTKIEVSKYKEVTSLGAAVLAGLEVKIWDSLDSVKSLLRRSDAVFHSKMDDKKRKKKTSEWNKAVERTLIQL

SEQ ID NO: 245 - protein, 501 aa, Plasmodium vivax
MKVILSIDQSTQSTKLIFFDEELNVLHTNSLNHEQKCFKPGWYEHDPVEIINNLYTLMNDGMKALKEKNKEVEIKCIGITNQRETVIIWDKLTGKPLYNAIVWLDTRVEDIVAQFSKKYNNDYFQKKTGTYFNTYFSGFKILWLIQNNQEIRKKVEEGSAIIGNVNTWLIYNLTNGNSYTDVTNASRTLLMNINTLEWDEELCKMFGITNMSVLPEIKCNCFNFGEVMSEQVPDYAGVPITGCIGDQQSACIGQAIFDEGEAKCTYGTGVFLLINTGYKVVYSSCGLITTVCYKFNENDQAKYALEGSIGTAGSGVSWLLKNNLISHPSEASYIMENCEDTGGVVFVPAFSGLYAPRWRSDARACITGMTFNTERKHIVRSLLEGIVFQLNEIVCSLISDMGIEMLHVLRCDGGMTKNKAFMQFNSDLINTKIEVSKYSEVTALGAAVLAGLGVKIWEDLDSVKSLIRSSDSTFNSKMDAKSRKRRISEWGKAVERSLLQM

SEQ ID NO: 246 - protein, 832 aa, Plasmodium yoelii
MVNFTVDQVREIMNKTKQIRNMSVIAHVDHGKSTLTDSLVSKAGIISSKHAGDARFTDTRADEQERCITIKSTGISMYFEHDLEDGEGKKPFLINLIDSPGHVDFSSEVTAALRVTDGALVVVDTIEGVCVQTETVLYQALGERIKPVLHVNKVDRALLELQMEVEDIYQTFARTIESVNVIISTYTDKLMGDIQVYPEKGTVSFGSGLQGWAFTLETFSRIYSKKFGIEKSKMMQRLWGNSFYDAKTKKWSKNQQEGYKRGFCQFIMEPILNLCQSIMNDDKEKYTKMLQNIGVELKGDDKLLTGKQLLKKAMQLWLPAGDTLLEMIVTHLPSPATAQKYRVENLYEGPMDDEAANAIRNCDPNGPLMMYISKMVPTSDKGRFYAFGRVFSGTVATGQKVRIQGPHYVPGEKTDLYEKNIQRTVLMMGRYTEQVQDVPCGNTCCLVGVDQYIVKSGTITTFKEAHNIADMKYSVSPVVRVAVKPKDSKQLPKLVDGLKKLAKSDPLVLCTTDESGEHIISGCGELHIEICLKDLKDEYAQIDFIVSDPVVSYRETVTEESTITCLGKSPNKHNRLFMKAYPLAEGLPEDIDKGKVSDKDDPKTRANYLHSNYQWDKNLALKIWAFGPETIGPNLLTDNTSGIQYMNEIKVHCVAAFQWASKEGVLCEENMRGCEFRMLDVHMHADAIHRGAGQIMPACKKCIYACELTAVPRLVEPIYLVDISCPQDVVSGVYSVLNKRRGIVISEDQKLGTPLLKIQAHLPVAESFGFTSALRAATSGQAFPQCVFDHWSVLYDDPFDSNKNSYKIIMNIRERKGIKVEMPQLDNYLDKL

SEQ ID NO: 247 - protein, 832 aa, Plasmodium falciparum
MVNFTVDQVREIMNKTKQIRNMSVIAHVDHGKSTLTDSLVSKAGIISSKNAGDARFTDTRQDEQERCITIKSTGISMYFEHDLEDGEGKKPFLINLIDSPGHVDFSSEVTAALRVTDGALVVVDTIEGVCVQTETVLYQALGERIKPVLHVNKVDRALLELQMEVEDIYQTFARTIESVNVIISTYTDKLMGDIQVYPEKGTVSFGSGLQGWAFTLETFSRIYSKKFGIEKKKMMQRLWGNSFYDAKTKKWSKNQQEGYKRGFCQFIMEPILNLCQSIMNDDKEKYTKMLTNIGVELKGDDKLLTGKQLLKKAMQLWLPAGDTLLEMIVTHLPSPADAQKYRVENLYEGPMDDEAANAIRNCDPNGPLMMYISKMVPTSDKGRFYAFGRVFSGTVATGQKVRIQGPHYVPGEKTDLYEKNIQRTVLMMGRYTEQVQDVPCGNTCCLVGVDQYIVKSGTITTFKEAHNIADMKYSVSPVVRVAVKPKDSKQLPKLVDGLKKLAKSDPLVLCTTDESGEHIISGCGELHIEICLKDLKDEYAQIDFIVSDPVVSYRETVTEESTITCLGKSPNKHNRLFMKAYPLAEGLPEAIDKNKVSDKDDPKTRANYLHSNFQWDKNLALKIWAFGPETIGPNLLTDNTSGIQYMNEIKVHCVAAFQWASKEGVLCEENMRGIEFRMLDVHMHADAIHRGAGQIMPACKKCIYACELTAFPRLVEPIYLVDISCPQDVVSGVYGVLNKRRGIVISEEQKLGTPLLKIQSHLPVSESFGFTSALRAATSGQAFPQCVFDHWSVLYDDPFDSNKNSYKIIMNIRERKGIKVEMPQLDQYLDKL

SEQ ID NO: 248 - protein, 832 aa, Plasmodium vivax
MVNFTVDQVREIMNKTKQIRNMSVIAHVDHGKSTLTDSLVSKAGIISSKHAGDARFTDTRADEQERCITIKSTGISMYFEHDLEDGEGKKPFLINLIDSPGHVDFSSEVTAALRVTDGALVVVDTIEGVCVQTETVLYQALGERIKPVLHVNKVDRALLELQMEVEDIYQTFARTIESVNVIISTYTDKLMGDIQVYPEKGTVSFGSGLQGWAFTLETFSRIYSKKFGIEKSKMMQRLWGNSFYDAKTKKWSKNQQEGYKRGFCQFIMEPILNLCQSIMNDDKDKYTKMLTNIGVELKGDDKNLTGKQLLKKAMQLWLPAGDTLLEMIVTHLPSPATAQKYRVENLYEGPMDDEAANAIRNCDPQGPLMMYISKMVPTSDKGRFYAFGRVFSGTVATGQKVRIQGPHYVPGEKTDLYEKNIQRTVLMMGRYTEQVQDVPCGNTCCLVGVDQYIVKSGTITTFKEAHNIADMKYSVSPVVRVAVKPKDSKQLPKLVDGLKKLAKSDPLVLCQTDESGEHIISGCGELHIEICLKDLKDEYAQIDFIVSDPVVSYRETVTEESSMTCLGKSPNKHNRLFMKAFPLAEGLPEDIDKNKVSDKDDPKARANYLHSNYQWDKNLALKIWAFGPETIGPNLLTDNTSGIQYMNEIKVHCVAAFQWASKEGVLCEENMRGCEFRMLDVHMHADAIHRGAGQIMPACKKCIYACELTAFPRLVEPIYLVDISCPQDVVSGVYSVLNKRRGIVISEDQKLGTPLLKIQAHLPVAESFGFTSALRAATSGQAFPQCVFDHWSVLYDDPFDSNKNSYKIIMNIRERKGIKVEMPQLDNYLDKL

SEQ ID NO: 249 - protein, 494 aa, Plasmodium yoelii
MSEYNLKKDDDSPFYKLDTIKCEVPINSEFNDRINKFVNQLRISYGTLEEFVDNFVYELKKGLEAHRRHPNLWIPHECSFKMLDSCISDIPTGQERGTYYAIDFGGTNFRAVRASLDGNGKIKRDQETYSLKFTGTFSHEKGLLDKHATASQLFDHFAERIKYIMGEFNDLDDNNEKSVGFTFSFPCTSPSINCSILIDWTKGFETGRATNDPVEGRDVCKLMNDAFIRSSVPAKVSCVVNDAVGTLMSCAYQKGKSAPPCYIGIILGTGSNGCYYEPDWKKYKYSGKIINIELGNFDKDLPLSPIDLVMDWYSANRSRQLFEKMISGAYLGEIVRRFMVNVLQSASSKKMWQSDSFNSESGSVVLNDTTPDFRECKKIAKQTWDMDFTDEQIYALRKICEAVYNRSAALAAAAIAAIAKRIKIIEHSKFSCGVDGSLFVKNAWYCNRLKEHLRVILADKAENLIIIPADDGSGKGAAITAAVVSLSSNMKQLP

SEQ ID NO: 250 - protein, 493 aa, Plasmodium falciparum
MSEYDIAKNDVTYTKLDTIECDIPINEELSWRINKFVNQLRISYSTLEEFVDNFVYELKKGLEAHRKHPNLWIPHECSFKMLDSCIANIPTGQEKGTYYAIDFGGTNFRAVRASLDGKGKIKRDQETYSLKFTGSYSHEKGLLDKHATASQLFDHFAERIKYIMGEFNDLDNKEVKSVGFTFSFPCTSPSINCSILIDWTKGFETGRATNDPVEGRDVCKLMNDAFVRAAIPAKVCCVLNDAVGTLMSCAYQKGRGTPPCYIGIILGTGSNGCYYEPEWKKYKYAGKIINIEFGNFDKDLPTSPIDLVMDWYSANRSRQLFEKMISGAYLGEIVRRFMVNVLQSACSKKMWISDSFNSESGSVVLNDTSKNFEDSRKVAKAAWDMDFTDEQIYVLRKICEAVYNRSAALAAGTIAAIAKRIKIIEHSKFTCGVDGSLFVKNAWYCKRLQEHLKVILADKAENLIIIPADDGSGKGAAITAAVIALNADIPQLP

SEQ ID NO: 251 - protein, 493 aa, Plasmodium vivax
MSYYNLEKDDTVYYKLDTIKCDIPINEELQARINKHVNQLRITYSTLEEFVDNFVYELKKGLEAHRRHPNLWIPHECSFKMLDSCIADIPTGQEKGTYYAIDFGGTNFRAVRASLDGNGKIKRDQETYSLKFTGTFSHEKGLLDKHATASQLFDHFAERIKYIMGEFKDLDNPEGKNVGFTFSFPCTSPSINCSILIDWTKGFETGRATNDPVEGRDVCKLMNDAFVRSEVPAKVCCVVNDAVGTLMSCAYQKGKTTPPCYIGIILGTGSNGCYYEPEWKKYKYSGKIINIELGNFDKDLPLSPIDLVMDWHSANRSRQLFEKMISGAYLGEIVRRFMVNVLQSASSEKMWKSDSFNSELGSVVLNDTSPNFEESRKVAKDAWDMDFTDEQIYALRKICESVYNRSAALAAAAIAAIAKRIKIIEHSKFSCGVDGSLFVKNAWYCKRLQEHLKVILADKAENLIIIPADDGSGKGAAITAAVVSQSSSIKQLP

SEQ ID NO: 252 - protein, 312 aa, Plasmodium yoelii
  misc_feature (8)..(8): Xaa can be any naturally occurring amino acid
MAIYEEMXRDKKVYVLGEDVGLYGGSYNVTKNLAHLFGFARVLDTPICENAFMGLGIGSSINGLRPIVEGMNLSFLILAFNQISNNACMLRYMSNGQFNIPLVIRGPGGVGKQLGPEHSQRIESYIMSIPGIKIVACSTPFNARGLLKSAIRENNPVLFLEHVLLYNKEDDIPILPYTLPIDKAEIVKKGNDLTILCYGITRHLAIEASKELSNIGIDVEIIDLISLKPFDLETIKYSLEKTKKCLILDESAGFGGIGAELYSQIVENFSSILSKKPVRLCTKDVPIAYSSKFEEACIIKKEDIIYMATYMT

SEQ ID NO: 253 - protein, 415 aa, Plasmodium falciparum
MGRKRNNIVNIRYNFFLIYFWVIFMYPCETNKGNVKPLNFIKGKNIFLNITKNKVKHLNTINGIETISNVENKNILNDTNYINEMKNIKVRRNISEALHMAIYEEMKKDKGVYVLGEDVGLYGGSYKVTKNLAHFFGFSRVLDTPICENAFMGLGIGSAINDLRPIIEGMNLSFLILAFNQISNNACMMRYMCDGQFNIPIVIRGPGGIGKQLGPEHSQRIESYLMSIPGIKIVSCSTPFNARGLLKSAIRDNNPILFIEHVLLYNYEQEIPLLPYTLPIDKAEVVKNGKDLTVLSYGITRHLASEAAKELTKFNIDIEVIDLISLKPFDMETIEKSLKKTKKCLILDESAGFGGIGAELYTQVIEMFSSYLITKPIRLCTKDIPIAYSNKYEDACIIKKEDIVYMSTYLHSLSS

SEQ ID NO: 254 - protein, 406 aa, Plasmodium vivax
MHNGVMLFLWLGVCLTWSGQSRKEPTKLLSFIGRENHPPGGKRTNTKGYMSANTTVTVGGGNNIATLNEGNYKKELKNVKVKRNISEALHMATYEEMKRDKSVYVLGEDVGLYGGSYKVTKNLAHFFGFARVLDTPICENSFMGLGIGSCINGLRPIVEGMNLSFLILAFNQISNNACMMRYMCDGQFNIPIVIRGPGGIGKQLGPEHSQRIESYLMSVPGIKIVSCSTPFNARGLLKSAIRDNNPVLFLEHVLLYNVEEEIPLLPYTLPIDRAETVRRGNHLTILCYGVTRHVAMEAAKELANINIDVEVIDLISLKPFDLETIGNSLKKTRKCLILDESAGFGGIGAELYTQVVEKFSPFLERRPVRLCTKDVPIAYSSRFEDACIVKKEDVVYMATYMHGQRG

SEQ ID NO: 255 - protein, 169 aa, Plasmodium yoelii
MKINIASIIFIIFSLCLVNDAYGKNKYGKNGKYGSQNVIKKHGEPVINVQDLISDMVRKEEEIVKLTKNKKSLRKINVALATALSVVSAILLGGAGLVMYNTEKGRRPFQIGKSKKGGSAMARDSSFPMNEESPLGFSPEEMEAVASKFRESMLKDGVPAPSNTPNVQN

SEQ ID NO: 256 - protein, 162 aa, Plasmodium falciparum
MKILSVFFLALFFIIFNKESLAEKTNKGTGSGVSSKKKNKKGSGEPLIDVHDLISDMIKKEEELVEVNKRKSKYKLATSVLAGLLGVVSTVLLGGVGLVLYNTEKGRHPFKIGSSDPADNANPDADSESNGEPNAGPQVTAQDVTPEQPQGDDNNLVSGTEH

SEQ ID NO: 257 - protein, 148 aa, Plasmodium vivax
MKLLAAVFLLFCAILCNHALGDNVNGLGAGNPKKKSPKSKSPEPLIDVHELISEIVRKEEELVNMTKKKSNYKLATTVLASALGVVSAVLLGGAGLVFYNAGNGRHPFSLGGGKGGDAAPTEPTPAPTAPSATGLNDDGSSSGTESTS

SEQ ID NO: 258 - protein, 335 aa, Plasmodium yoelii
MTTNQINKRIYIPKFYADANIHKPKEYYDYDNLELQWNKPNRYEILKKVGRGKYSEVFNGYDTEYNRLCAIKVLKPVKKKKIKREIKILQNLHGGPNIIKLLDIVKDPVTKTPSLIFEYINNIDFKTLYPKFTDKDIRYYIYQILKALDYCHSQGIMHRDVKPHNIMIDHENKQIRLIDWGLAEFYHPGQEYNVRVASRYYKGPELLIDLQLYDYSLDIWSLGCMLAGMIFKKEPFFCGHDNYDQLVKIAKVLGTEDLHAYLKKYNIKLKPHYLSILGEYERKPWSHFLNQSNMDIAKDEVIDLIDKMLIYDHAKRIAPKEAMEHPYFKDVREES

SEQ ID NO: 259 - protein, 335 aa, Plasmodium falciparum
MSVSSINKKIYIPKFYADVNIHKPKEYYDYDNLELQWNKPNRYEIMKKIGRGKYSEVFNGYDTECNRPCAIKVLKPVKKKKIKREIKILQNLNGGPNIIKLLDIVKDPVTKTPSLIFEYINNIDFKTLYPKFTDKDIRYYIYQILKALDYCHSQGIMHRDVKPHNIMIDHENRQIRLIDWGLAEFYHPGQEYNVRVASRYYKGPELLIDLQLYDYSLDIWSLGCMLAGMIFKKEPFFCGHDNYDQLVKIAKVLGTEDLHAYLKKYNIKLKPHYLNILGEYERKPWSHFLTQSNIDIAKDEVIDLIDKMLIYDHAKRIAPKEAMEHPYFREVREES

SEQ ID NO: 260 - protein, 382 aa, Plasmodium vivax
MSSSSISKRIYIPKFYADVNIHKPKEYYDYDNLELQWNKPNRYEIMKKIGRGKYSEVFNGYDTEYNRPCAIKVLKPVKKKKIKREIKILQNLHGGPNIIKLLDIVKDPVTKTPSLIFEYINNIDFKTLYPKFTDKDIRYYIYQILKALDYCHSQGIMHRDVKPHNIMIDHENKQIRLIDWGLAEFYHPGQEYNVRVASRYYKGPELLIDLQLYDYSLDIWSLGCMLAGMIFKKEPFFCGHDNYDQLVKIAKVLGTDDLHAYLKKYNIKLKPHYLNILGEYERKPWSHFLTQSNIDIAKDEVIDLIDKMLIYDHAKRIAPKEAMEHPYFSEVREQSKGQDNSADIQHSGGRSSLEGPRFEGKPIPNPLLGLDSTRTGHHHHHH

SEQ ID NO: 261 - protein, 1772 aa, Plasmodium yoelii
MKVIGLLFSFVFFAIKCKSETIEVYNDLIQKLEKLESLSVDGLELFQKSQVIINATQPTETIDPFTNHNFAQQVQDFVTKFEGLGFTEQTELVNLIKALTPNRYGVKYLIESKEEFNGLMHAINFYYDVLRDKLNDMCANNYCEIPEHLKISEEETEMLKKVILGYRKPIENIQDDIEKLEIYIERNKETVAALNALIAEETKKIQPEGNEDCNDASCDSDKYNKKKPIYQAMYNVIFYKKQLAEIQKVVEVLEKRVSTLKKNDAIKPLWQQIEVLNAAPVVTAETQIVTGGQSSTEPGSGGSSASGTSSSGQASAGTGVEQANTVASVTVTPSVGQNGEASTNPQTAQVQPVPTLTLEEKQKKIAGLYAQIKEIAKTIKFNLEGIFVDPIELEYFKKEKKKESCNLSTSSCKKNKASETIIPLTIRYPNGISYPLPENDVYNKIANNAAETTYGDLTHPDNTPLTGDLATNEQARKDLIKAIKKKIKAEEKKLETLKTNYDNKLTEFNQQKTPFKEAAKEFYESKFRNKLTSEIFEKFKTKRDEYMTKKTELNTCEYGNTKELINKLNKQLNYLQDYSLRKDIISNEIEYFSNKKKELQYNINRLAEAVQAKQNVLVASKDVPLSTLVELQIQKSLLTKQIEQLNKTEVSLNKAQLKDKLYVPKTYGNEGKPEPYYLIAVKKEVDRLAQFIPKIESMIAKEKERMEQGPAITGESEEVPSGPSAESSTDRSTQSSTSSSSSSSSTPAAAESSSATLPEAPAPAEAASPSTEASEETTIPPTTQETQPSQAASSTTPAKPVMTKLYYLEKLQKFLVFSYSCHKYVLLQNSTINKDALSKYALTSEEDKIRTLKRCSELDVLLAIQNNMPTMYSLYESIVDGLQNIYTELYEKEMMYHIYKLKDENPSIKSLLVKAGVIEPEPVAAPTPVTPAATEQQQQQATPDVQSDAPAPSDVSQQPETPVTSTTPEVTTSTEASSSAPGEGTPSGEAGASGTEGATASNAATPAGTSASGSAASNASTTSDVTPPAAAAAVPSTSTPAPAQPPAANSQSGNPDSGIRSRAESEEDMPADDFELDNLYKSYLQQIDGNNTEFINFIKSKKELIKALTPEKVNQLYLEIAHLKELSEHYYDRYSTYKLKLERLYNKHEQIQLTNRQIRDLSILKARLLKRKQTLNGVFYILNGYVNFFNKRREAEKQYVDNALKNTDMLLKYYKARTKYFTSEAVPLKTLSKASLDRESNYLKIEKFRAYSRLELRLKKNINLGKERISYVSGGLHHVFEEFKELIKDKDYTGKKNPDNAPEVTNAFEQYKELLPKGVTVSTPAVAVTTTLAADAPATPEGAVPGAVPGAVPGAVPGAVPGAVPGSGTDTRVAGSSVDDNEDDDIYQIASGQSEDAPEKDILSEFTNESLYVYTKRLGSTYKSLKKHMLREFSTIKEDMTNGLNNKSQKRNDFLEVLSHELDLFKDLSTNKYVIRNPYQLLDNDKKDKQIVNLKYATKGINEDIETTTDGIKFFNKMVELYNTQLAAVKEQIATIEAETNDTNKEEKKKYIPILEDLKGLYETVIGQAEEYSEELQNRLDNYKNEKAEFEILTKNLEKYIQIDEKLDEFVEHAENNKHIASIALNNLNKSGLVGEGESKKILAKMLNMDGMDLLGVDPKHVCVDTRDIPKNAGCFRDDNGTEEWRCLLGYKKGEGNTCVENNNPTCDINNGGCDPTASCQNAESTENSKKIICTCKEPTPNAYYEGVFCSSSSFMGLSILLIITLIVFNIF

SEQ ID NO: 262 - protein, 1720 aa, Plasmodium falciparum
MKIIFFLCSFLFFIINTQCVTHESYQELVKKLEALEDAVLTGYSLFQKEKMVLNEEEITTKGASAQSGASAQSGASAQSGASAQSGASAQSGASAQSGTSGPSGPSGTSPSSRSNTLPRSNTSSGASPPADASDSDAKSYADLKHRVRNYLFTIKELKYPELFDLTNHMLTLCDNIHGFKYLIDGYEEINELLYKLNFYFDLLRAKLNDVCANDYCQIPFNLKIRANELDVLKKLVFGYRKPLDNIKDNVGKMEDYIKKNKTTIANINELIEGSKKTIDQNKNADNEEGKKKLYQAQYDLSIYNKQLEEAHNLISVLEKRIDTLKKNENIKKLLDKINEIKNPPPANSGNTPNTLLDKNKKIEEHEEKIKEIAKTIKFNIDSLFTDPLELEYYLREKNKKVDVTPKSQDPTKSVQIPKVPYPNGIVYPLPLTDIHNSLAADNDKNSYGDLMNPHTKEKINEKIITDNKERKIFINNIKKKIDLEEKNINHTKEQNKKLLEDYEKSKKDYEELLEKFYEMKFNNNFNKDVVDKIFSARYTYNVEKQRYNNKFSSSNNSVYNVQKLKKALSYLEDYSLRKGISEKDFNHYYTLKTGLEADIKKLTEEIKSSENKILEKNFKGLTHSANGSLEVSDIVKLQVQKVLLIKKIEDLRKIELFLKNAQLKDSIHVPNIYKPQNKPEPYYLIVLKKEVDKLKEFIPKVKDMLKKEQAVLSSITQPLVAASETTEDGGHSTHTLSQSGETEVTEETEETEETVGHTTTVTITLPPTQPSPPKEVKVVENSIEHKSNDNSQALTKTVYLKKLDEFLTKSYICHKYILVSNSSMDQKLLEVYNLTPEEENELKSCDPLDLLFNIQNNIPAMYSLYDSMNNDLQHLFFELYQKEMIYYLHKLKEENHIKKLLEEQKQITGTSSTSSPGNTTVNTAQSATHSNSQNQQSNASSTNTQNGVAVSSGPAVVEESHDPLTVLSISNDLKGIVSLLNLGNKTKVPNPLTISTTEMEKFYENILKNNDTYFNDDIKQFVKSNSKVITGLTETQKNALNDEIKKLKDTLQLSFDLYNKYKLKLDRLFNKKKELGQDKMQIKKLTLLKEQLESKLNSLNNPHNVLQNFSVFFNKKKEAEIAETENTLENTKILLKHYKGLVKYYNGESSPLKTLSEVSIQTEDNYANLEKFRVLSKIDGKLNDNLHLGKKKLSFLSSGLHHLITELKEVIKNKNYTGNSPSENNKKVNEALKSYENFLPEAKVTTVVTPPQPDVTPSPLSVRVSGSSGSTKEETQIPTSGSLLTELQQVVQLQNYDEEDDSLVVLPIFGESEDNDEYLDQVVTGEAISVTMDNILSGFENEYDVIYLKPLAGVYRSLKKQIEKNIFTFNLNLNDILNSRLKKRKYFLDVLESDLMQFKHISSNEYIIEDSFKLLNSEQKNTLLKSYKYIKESVENDIKFAQEGISYYEKVLAKYKDDLESIKKVIKEEKEKFPSSPPTTPPSPAKTDEQKKESKFLPFLTNIETLYNNLVNKIDDYLINLKAKINDCNVEKDEAHVKITKLSDLKAIDDKIDLFKNPYDFEAIKKLINDDTKKDMLGKLLSTGLVQNFPNTIISKLIEGKFQDMLNISQHQCVKKQCPENSGCFRHLDEREECKCLLNYKQEGDKCVENPNPTCNENNGGCDADATCTEEDSGSSRKKITCECTKPDSYPLFDGIFCSSSNFLGISFLLILMLILYSFI

SEQ ID NO: 263 - protein, 1751 aa, Plasmodium vivax
MKALLFLFSFIFFVTKCQCETESYKQLVAKLDKLEALVVDGYELFHKKKLGENDIKVETNASANNNNNNQVSVLTSKIRNFLSKFLELQIPGHTDLLHLIRELAVEPNGIKYLVESYEEFNQLMHVINFHYDLLRAKLHDMCAHDYCKIPEHLKISDKELDMLKKVVLGYRKPLDNIKDDIGKLETFITKNKITIKNISDLIIAENKKRSGHPTTTTNGAGTQPANGSIAAASSETTQISGSSNSGSSSTGSSNSGSSSTGSSGTGSTGTGQSPPAAADASSTNANYEAKKIIYQAVYNTIFYTNQLQEAQKLIAVLEKRVKVLKEHKDIKVLLEQVAKEKEKLPSDYPNTTNLTNVHKEAESKIAELEKKIEAIAKTVNFDLDGLFTDAEELEYYLREKAKMAGTLIIPESTKSAGTPGKTVPTLKETYPHGISYALAENSIYELIEKIGSDETFGDLQNPDDGKQPKKGILINETKRKELLEKIMNKIKIEEDKLPNLKKEYEEKYKVYEAKVNEFKPAFNHFYEARLDNTLVENKFDDFKKKREAYMEEKKKLESCSYEQNSNLINKLKKQLTYLEDYVLRKDIADDEIKHFSFMEWKLKSEIYDLAQEIRKNENKLTIENKFDFSGVVELQVQKVLIIKKIEALKNVQNLLKNAKVKDDLYIPKVYKTSEKPEPYYLMVLKREIDKLKDFIPKIESMIATEKNKPTVAAADIVAKGQSLRGASETGTTGNTVNAQTAVVQPQHQVVNAVTVQPGTTGHQAQGGEAETQTNSVQAAQVQQTPAGAGGQVASTQTISQAPAPTQASPEPAPAAPPSTPAAAVAPAPTMSKLEYLEKLLDFLKSAYACHKHIFVTNSTMKKELLDQYKLNADEQNKINETKCDELDLLFNVQNNLPAMYSIYDSMSNELQNLYIELYQKEMVYNIYKNKDTDKKIKAFLETLKSKAAAPAQSAAKPSGQAGTTPVTTTAPVTTTTVTPSPQTSVVTSTPPTPQAEENRRVGGNSEEKPEADTAQVEKFYEKHLSQIDKYNDYFQKFLESQKDEITKMDETKWKALGAEIEELKKKLQVSLDHYGKYKLKLERLLKKKNKISNSKDQIKKLTSLKNKLERRQNLLNNPTSVLKNYTAFFNKKRETEKKEVENTLKNTEILLKYYKARAKYYIGEPFPLKTLSEESMQKEDNYLNLEKFRVLSRLEGRLGKNIELEKENISYLSSGLHHVLTELKEIIKNKKYSGNDHTKNIAAVKEALQAYQELIPKVTTQEGASTTAATLPVTVPSAVPGGLPGAGVPGAAAGLTPPPPAGSVPATGPGAAAGSTEENVAAKAQDYAEDYDKVIALPLFGNNDDDGEEDQVTTGEAESEAPEILVPAGISDYDVVYLKPLAGMYKTIKKQLENHVNAFNTNITDMLDSRLKKRNYFLEVLNSDLNPFKYSSSGEYIIKDPYKLLDLEKKKKLIGSYKYIGASIDMDLATANDGVTYYNKMGELYKTHLDGVKTEIKKVEDDIKKQDEELKKLGNVNSQDSKKNEFIAKKAELEKYLPFLNSLQKEYESLVSKVNTYTDNLKKVINNCQLEKKEAEITVKKLQDYNKMDEKLEEYKKSEKKNEVKSSGLLEKLMKSKLIKENESKEILSQLLNVQTQLLTMSSEHTCIDTNVPDNAACYRYLDGTEEWRCLLTFKEEGGKCVPASNVTCKDNNGGCAPEAECKMTDSNKIVCKCTKEGSEPLFEGVFCSSSSFLSLSFLLLMLLFLLCMEL

SEQ ID NO: 264 - protein, 323 aa, Plasmodium yoelii
MMAYKKLCFLAILALSLKAVSANDFSNNDDNIDDENVSDVINIFKNKNHDLYNNPNYISDIKKKFQLLKNQIDQMNKYEKGMSSGDIANILDEDSDDDSNNDEIVFGMSEEDLDNYDDDFWGQNAKKITPVQKGPDANGATLVEGNDEPQVGGGDQGGKVNQGAQVINAVQGGDGLVQGSSGDQVSEDPEPNLEKTAFLGAIFDEILKEQHHDDDVHSTEYHSKYNSLKNECDFPMNLEEYNIAKKLISSYFQSGSTENPIYLYDILLKSLKDEEYKKHFKNFIYGIYSFAKKYNYLSATRLAEANSQFIPNVLKALATVDLK

SEQ ID NO: 265 - protein, 351 aa, Plasmodium falciparum
MKSNIIFYFSFFFVYLYYVSCNQSTHSTPVNNEEDQEELYIKNKKLEKLKNIVSGDFVGNYKNNEELLNKKIEELQNSKEKNVHVLINGNSIIDEIEKNEENDDNEENNDDDNTYELDMNDDTFLGQNNDSHFENVDDDAVENEQEDENKEKSESFPLFQNLGLFGKNVLSKVKAQSETDTQSKNEQEISTQGQEVQKPAQGGESTFQKDLDKKLYNLGDVFNHVVDISNKKNKINLDEYGKKYTDFKKEYEDFVLNSKEYDIIKNLIIMFGQEDNKSKNGKTDIVSEAKHMTEIFIKLFKDKEYHEQFKNYIYGVYSYAKQNSHLSEKKIKPEEEYKKFLEYSFNLLNTM

SEQ ID NO: 266 - protein, 298 aa, Plasmodium falciparum
MIKGLIFYLFICFFVFFVHAVSSQEQPNHTDIYTNEDYKLLEELEKYLDNLKNTFTHKFLENFKGDIELLKKNIQNFEKNNYNNVTGQNVDDYDKNGDNNNHNDLEQNQLLQSNIKSFFGQSRTTNTVDVSASKVTQKSDETKADEKAEQNAEANASSSASSEEQSSSLQNTNDQSFGNTNNPKMDRKNADEQKRDAGLSNLKNIDKLCDELLIYLYKKNEVNTNNYLRKYDEFKNKFDQFLLNVNKYELLKKLILNFFKDNLKDHRAQYKFYIALMKALENEKFSQEFKKVMYGLYS

SEQ ID NO: 267 - protein, 281 aa, Plasmodium falciparum
MKGQAIYFVFVFLYFLNCVGCNSKNNNKRTSYNKKKENLKNFDNIVLDDFYSAFDSQDNYESKLKKNEDDIIGQGIFSLISKKNQEKEKSLKGESEDNTKLQVTKVQGAQVDQAVEPLEKSPEDENKEIPTLDSPQNGNPTSYTSNLSTPPLKRMDEVFDDVLKHLNKEDKVVTDENKNKYNEFKKEFDIFTMNVSEYEIMKNLLITFSKKIDENNQIQTKIENIFNKALKDNKYKEQFKNFIYGLYSFAKRHNYLIVNKTNDTTLHKDLFENALNLINTI

SEQ ID NO: 268 - protein, 372 aa, Plasmodium vivax
MKGVTGPICCLFLFLFSCASSEKLGVQKKKKNLEQDATHALMKKLESLYKLSATDNSEIFNKEIESLKKQIDQLHQHGGENEGESLGHLLESEAANESAKKTIFGVDEDDLDNYDADFIGQSKGKIKGQADTDNQAQRTADVAAQPGGVSPSTSARPQEPGKTGVTGSPNGLVEAGLVNTKTLQNVGPNGQRAADPQPGRAANLPEGQRTNDPQQGGSESTEGPAVTPRPSSTVTPSDANDAKIKYLDKLYDEVLTTSDNTNGIHVPDYHSKYNTIRQKYEYSMNPVEYEIVKNLFNVGFKNDGAASSDATPLVDVFKKALADETFQAEFDNFVHGLYGFAKRHNYLSEARMKDADRYTNLLKNAISLMYTI

SEQ ID NO: 269 - protein, 209 aa, Plasmodium yoelii
MTYLYNFFFFFFFFFSRGKAELIRLIFAYLQVKYTDIRFGVNGDAFAEFNNFKKEKEIPFNQVPILEIGGLILAQSQAIVRYLSKKYNISGNGELNEFYADMIFCGVQDIHYKFNNTNLFKQNETTFLNEELPKWSGYFEKLLQKNNTNYFVGDTITYADLAVFNLYDDIESKYPNCLKNFPLLKAHIELISNIPNIKHYIANRKESVY

SEQ ID NO: 270 - protein, 205 aa, Plasmodium vivax
MAEEIVLYYFDARGKAELIRLIFAYLGIQYTDKRFGENGDAFIEFKNFKKEKETPFNQVPILEMDNIIFAQSQAIVRYLSKKYKISGNSELNEFYADMIFCGVQDIHYKFNNTNLFKQNETTFLNEELPKWSGYFENILKKNNCNYFVGDDLTYADLAVFNLYDDIETKYPNSLKNFPLLKAHNEFISNLPNIKNYISNRKESVY

SEQ ID NO: 271 - protein, 402 aa, Plasmodium yoelii
MDQLKIKRGNFLFTSESVNEGHPDKVCDQISDAILDACLKEDPESKVACEVCAKKNFIFIFGEITTKAKVNYDQVTRNVLKHIGYDDEKKGLDYKNAEIKVFIDEQSPDIAQCVHENKQPELIGAGDQGIMFGYATDETENYMPLTHHYATLLGKRLTEVRKLGILPYLGPDGKTQITIEYKNKASGVYHMEPIRVHTVLISTQHSENVKYEQLKSDLMENVVKYVIPEKLLDKDTLYYLNPSGKFVLGGPAADAGLTGRKIICDTYGGWGAHGGGAFSGKDASKVDRSAAYYLRYIAKSLVANKFCRRVLVQASYSIGIANPVSLNVNSYGTVSTGYTDYDLEQIILRNFDLRPGFIIDELKLKEPIFSKTSAYGHFGRDDKSFTWEKVKDLTHEKNVLKN

SEQ ID NO: 272 - protein, 402 aa, Plasmodium falciparum
MSQLKIKRGNFLFTSESVNEGHPDKICDQISDAILDSCLREDPYSKVACEVCAKKNYIFIFGEITTKAKVNYDKVTRDVLKHIGYDDESKGLDYKTAEIKVSIDEQSPDIAQCVHENRSPELIGAGDQGIMFGYATDETENYMPLTHHYATLLGKRLTEVRKLGILPYLGPDGKTQITIEYKNKGSCGGHLEPLRVHTVLISTQHAEDIKYEQLKTDLMENVIKYVIPEKLLDNETLYYLNPSGKFVLGGPAADAGLTGRKIICDTYGGWGAHGGGAFSGKDASKVDRSAAYYLRFIAKSLVANKFCRRVLVQASYSIGIANPISLNVNSYGTVSTGYTDYDLEQIILRNFDLRPGFIIQELKLTEPVFSKTSAYGHFGREGDTFTWEKIKDLSHEKNALKN

SEQ ID NO: 273 - protein, 402 aa, Plasmodium vivax
MSHLKIKRGNFLFTSESVNEGHPDKVCDQISDAILDACLREDPESKVACEVCAKKNFIFILGEITTKAKVDYDKVARDVLKHIGYDDESKGLDYKTADIKIYIDEQSPDIAQCVHENKKPELIGAGDQGIMFGYATDEAENYMPLTHHYATLLGKRLTEVRKLGILPYLGPDGKTQITIEYKNKGSFGGHMEPLRVHTILISTQHAENVKYEQLKSDLIENVVKYVIPEKLLDEDTLYYLNPSGKFVLGGPAADAGLTGRKIICDTYGGWGAHGGGAFSGKDPSKVDRSAAYYLRYIAKSLVANKFCRRVLVQASYSIGIANPISLNVNSYGTASTGYTDYDLEQIILRNFDLRPGFIIEELKLKEPIFSNTSAYGHFGRSDNSFSWERIKDLTHEKNVLKN

1. A composition comprising a pharmaceutically acceptable carrier and one or more isolated polypeptides, wherein each of the one or more isolated polypeptides comprises:
(a) the amino acid sequence of KKERYXIWXRXPKXELHCHLD (SEQ ID NO: 1), wherein X is a lysine (K) residue, a glutamic acid (E) residue, an arginine (R) residue, an isoleucine (I) residue, a leucine (L) residue, a cysteine (C) residue, or a valine (V) residue,
(b) the amino acid sequence of KYKEGVVLMEFRYSP (SEQ ID NO: 2),
(c) an amino acid sequence comprising at least 20 contiguous amino acid residues of the sequence EDLAKXAVXXKYKEGVVLMEFRYSP (SEQ ID NO: 3), wherein X is a histidine (H) residue, a tryptophan (W) residue, a phenylalanine (F) residue, an isoleucine (I) residue, an asparagine (N) residue, or a glutamic acid (E) residue, or
(d) an amino acid sequence comprising at least 20 contiguous amino acid residues of the sequence KSMDTHPIRXLYDAGVKVSVNSDDPGMFL (SEQ ID NO: 4), wherein X is a glutamine (Q) residue, a methionine (M) residue, or a lysine (K) residue,
and wherein each of the one or more isolated polypeptides induces a protective immune response against Plasmodium falciparum and/or Plasmodium vivax in a mammal.

2. The composition of claim 1, which comprises an isolated polypeptide comprising the amino acid sequence of KKERYXIWXRXPKXELHCHLD (SEQ ID NO: 1), wherein X is K, E, R, I, L, C, or V.

3. The composition of claim 2, which comprises an isolated polypeptide comprising the amino acid sequence of KKERYEIWRRIPKVELHCHLD (SEQ ID NO: 5), KKERYKIWKRLPKCELHCHLD (SEQ ID NO: 6), or KKERYKIWKRIPKCELHCHLD (SEQ ID NO: 7).

4. The composition of claim 1, which comprises an isolated polypeptide comprising the amino acid sequence of KYKEGVVLMEFRYSP (SEQ ID NO: 2).

5. The composition of claim 1, which comprises an isolated polypeptide comprising at least 20 contiguous amino acid residues of the sequence EDLAKXAVXXKYKEGVVLMEFRYSP (SEQ ID NO: 3), wherein X is H, W, F, I, N, or E.

6. The composition of claim 5, which comprises an isolated polypeptide comprising at least 20 contiguous amino acid residues of the sequence EDLAKWAVIEKYKEGVVLMEFRYSP (SEQ ID NO: 8), EDLAKHAVFNKYKEGVVLMEFRYSP (SEQ ID NO: 9), or EDLAKHAVFNKYKEGVVLMEFRYSP (SEQ ID NO: 10).

7. The composition of claim 6, which comprises an isolated polypeptide comprising the amino acid sequence of EDLAKWAVIEKYKEGVVLMEFRYSP (SEQ ID NO: 8), EDLAKHAVFNKYKEGVVLMEFRYSP (SEQ ID NO: 9), or EDLAKHAVFNKYKEGVVLMEFRYSP (SEQ ID NO: 10).

8. The composition of claim 1, which comprises an isolated polypeptide comprising at least 20 contiguous amino acid residues of the sequence KSMDTHPIRXLYDAGVKVSVNSDDPGMFL (SEQ ID NO: 4), wherein X is Q, M, or K.

9. The composition of claim 8, which comprises an isolated polypeptide comprising at least 20 contiguous amino acid residues of the sequence of KSMDTHPIRKLYDAGVKVSVNSDDPGMFL (SEQ ID NO: 11), KSMDTHPIRMLYDAGVKVSVNSDDPGMFL (SEQ ID NO: 12), or KSMDTHPIRQLYDAGVKVSVNSDDPGMFL (SEQ ID NO: 13).

10. The composition claim 9, which comprises an isolated polypeptide comprising the amino acid sequence of KSMDTHPIRKLYDAGVKVSVNSDDPGMFL (SEQ ID NO: 11), KSMDTHPIRMLYDAGVKVSVNSDDPGMFL (SEQ ID NO: 12), or KSMDTHPIRQLYDAGVKVSVNSDDPGMFL (SEQ ID NO: 13).

11. The composition of claim 1, which comprises an isolated polypeptide comprising the amino acid sequence of SEQ ID NO: 14, SEQ ID NO: 15, SEQ ID NO: 16 or SEQ ID NO: 209.

12. A composition comprising a pharmaceutically acceptable carrier and one or more isolated polypeptides, wherein each of the one or more isolated polypeptides comprises:
(a) an amino acid sequence comprising at least 20 contiguous amino acid residues of the sequence MKKDREPIDEDEMRITSTGRMTNYVNYGAKILG (SEQ ID NO: 20),
(b) an amino acid sequence comprising at least 20 contiguous amino acid residues of the sequence KIKATGNAIGKAVTLAEIIKRRFKGLHQIT (SEQ ID NO: 21), or
(c) an amino acid sequence comprising SEQ ID NO: 22,
and wherein each of the one or more isolated polypeptides induces a protective immune response against Plasmodium falciparum and/or Plasmodium vivax in a mammal.

13. The composition of claim 12, which comprises an isolated polypeptide comprising at least 20 contiguous amino acid residues of the sequence MKKDREPIDEDEMRITSTGRMTNYVNYGAKILG (SEQ ID NO: 20).

14. The composition of claim 13, which comprises an isolated polypeptide comprising the amino acid sequence of SEQ ID NO: 20.

15. The composition of claim 12, which comprises an isolated polypeptide comprising at least 20 contiguous amino acid residues of the sequence KIKATGNAIGKAVTLAEIIKRRFKGLHQIT (SEQ ID NO: 21).

16. The composition of claim 15, which comprises an isolated polypeptide comprising the amino acid sequence of SEQ ID NO: 21.

17. The composition of claim 12, which comprises an isolated polypeptide comprising the amino acid sequence of SEQ ID NO: 22.

18. The composition of claim 17, wherein the isolated polypeptide comprises the amino acid sequence of KDAGYQPPLDEKYVKEMXPEEIVN (SEQ ID NO: 23), wherein X is a serine (S) residue or a threonine (T) residue.

19. The composition of claim 12, which comprises a polypeptide comprising the amino acid sequence of SEQ ID NO: 24, SEQ ID NO: 25, or SEQ ID NO: 26.

20. A composition comprising a pharmaceutically acceptable carrier and one or more isolated polypeptides, wherein each of the one or more isolated polypeptides comprises:
(a) an amino acid sequence which comprises at least 40 contiguous amino acid residues of the sequence MGKEKTHINLVVIGHVDSGKSTTTGHIIYKLGGIDRRTIEKFEKESAEMGKGSF KYAWVLDKLKAERERGITIDIALWKFETPRYFFTVIDAPGHKDFIKNMITGTS QADVALLVVPAEVGGFEGAFSKEGQTKEHALLAFTLGVKQIVVGVNKMDTV KYSEDRYEEIKKEV (SEQ ID NO: 30),
(b) an amino acid sequence which comprises at least 55 contiguous amino acid residues of the sequence DYLKKVGYQADKVDFIPISGFEGDNLIEKSDKTPWYKGRTLIEALDTMEPPKR PYDKPLRIPLQGVYKIGGIGTVPVGRVETGILKAGMVLNFAPSAVVSECKSVE MHKEVLEEARPGDNIGFNVKNVSVKEIKRGYVASDTKNEPAKGCSKFTAQVI ILNHPGEIKNGY (SEQ ID NO: 31),
(c) the amino acid sequence of HISCKFLNIDSKIDKRSGKVVEENPK (SEQ ID NO: 32), or
(d) an amino acid sequence which comprises at least 20 contiguous amino acid residues of the sequence LEPKKPMVVETFTEYPPLGRFAIRDMRQTIAVGIIK (SEQ ID NO: 33),
and wherein each of the one or more isolated polypeptides induces a protective immune response against Plasmodium falciparum and/or Plasmodium vivax in a mammal.

21. The composition of claim 20, which comprises an isolated polypeptide comprising at least 40 contiguous amino acid residues of the sequence MGKEKTHINLVVIGHVDSGKSTTTGHIIYKLGGIDRRTIEKFEKESAEMGKGSFKYA WVLDKLKAERERGITIDIALWKFETPRYFFTVIDAPGHKDFIKNMITGTSQADVALLV VPAEVGGFEGAFSKEGQTKEHALLAFTLGVKQIVVGVNKMDTVKYSEDRYEEIKKE V (SEQ ID NO: 30).

22. The composition of claim 21, which comprises an isolated polypeptide comprising the amino acid sequence of SEQ ID NO: 30.

23. The composition of claim 20, which comprises an isolated polypeptide comprising at least 55 contiguous amino acid residues of the sequence DYLKKVGYQADKVDFIPISGFEGDNLIEKSDKTPWYKGRTLIEALDTMEPPKRPYDK PLRIPLQGVYKIGGIGTVPVGRVETGILKAGMVLNFAPSAVVSECKSVEMHKEVLEE ARPGDNIGFNVKNVSVKEIKRGYVASDTKNEPAKGCSKFTAQVIILNHPGEIKNGY (SEQ ID NO: 31).

24. The composition of claim 23, which comprises an isolated polypeptide comprising the amino acid sequence of SEQ ID NO: 31.

25. The composition of claim 20, which comprises an isolated polypeptide comprising the amino acid sequence of HISCKFLNIDSKIDKRSGKVVEENPK (SEQ ID NO: 32).

26. The composition of claim 20, which comprises an isolated polypeptide comprising at least 20 contiguous amino acid residues of the sequence LEPKKPMVVETFTEYPPLGRFAIRDMRQTIAVGIIK (SEQ ID NO: 33).

27. The composition of claim 26, which comprises an isolated polypeptide comprising the amino acid sequence of SEQ ID NO: 33.

28. The composition of claim 20, which comprises an isolated polypeptide comprising the amino acid sequence of SEQ ID NO: 34, SEQ ID NO: 35, or SEQ ID NO: 36.

29. A composition comprising a pharmaceutically acceptable carrier and one or more isolated polypeptides, wherein each of the one or more isolated polypeptides comprises:
(a) the amino acid sequence of GKVAIILXGKHMGKRCIITK (SEQ ID NO: 40), wherein X is a threonine (T) residue or a serine (S) residue,
(b) the amino acid sequence of GKHMGKRCIITKXLXSGLLAVVGPYE (SEQ ID NO: 41), wherein X is an isoleucine (I) residue, a valine (V) residue, an asparagine (N) residue, or a threonine (T) residue, or
(c) the amino acid sequence of SGLLAVVGPYEXNGVPLKRV (SEQ ID NO: 42), wherein X is a valine (V) residue or an isoleucine (I) residue,
and wherein each of the one or more isolated polypeptides induces a protective immune response against Plasmodium falciparum and/or Plasmodium vivax in a mammal.

30. The composition of claim 29, which comprises an isolated polypeptide comprising the amino acid sequence of GKVAIILXGKHMGKRCIITK (SEQ ID NO: 40), wherein X is a threonine (T) residue or a serine (S) residue.

31. The composition of claim 30, which comprises an isolated polypeptide comprising the amino acid sequence of GKVAIILTGKHMGKRCIITK (SEQ ID NO: 43) or GKVAIILSGKHMGKRCIITK (SEQ ID NO: 44).

32. The composition of claim 29, which comprises an isolated polypeptide comprising the amino acid sequence of GKHMGKRCIITKXLXSGLLAVVGPYE (SEQ ID NO: 41), wherein X is an I, V, N, or T residue.

33. The composition of claim 32, which comprises an polypeptide comprising the amino acid sequence of GKHMGKRCIITKILNSGLLAVVGPYE (SEQ ID NO: 45) or GKHMGKRCIITKVLTSGLLAVVGPYE (SEQ ID NO: 46).

34. The composition of claim 29, which comprises an isolated polypeptide comprising the amino acid sequence of SGLLAVVGPYEXNGVPLKRV (SEQ ID NO: 42), wherein X is a V residue or an I residue.

35. The composition of claim 34, which comprises an isolated polypeptide comprising the amino acid sequence of SGLLAVVGPYEVNGVPLKRV (SEQ ID NO: 47) or SGLLAVVGPYEINGVPLKRV (SEQ ID NO: 48).

36. The composition of claim 29, which comprises an isolated polypeptide comprising the amino acid sequence of SEQ ID NO: 49, SEQ ID NO: 50, or SEQ ID NO: 51.

37. A composition comprising a pharmaceutically acceptable carrier and one or more isolated polypeptides, wherein each of the one or more isolated polypeptides comprises:
(a) an amino acid sequence comprising at least 20 contiguous amino acid residues of the sequence LEKKMQLKKEGKLLSAKAKEEKKK (SEQ ID NO: 55),
(b) an amino acid sequence comprising at least 21 contiguous amino acid residues of the sequence IVCILGHVDTGKTKLLDKLRHTNVQDNEAGGITQQIGATFFPKD (SEQ ID NO: 56),
(c) an amino acid sequence comprising at least 21 contiguous amino acid residues of the sequence the amino acid sequence of SKGIMIIDTPGHESFYNLRKRGSSLCDIAILVIDLMHGLEQQTKESIQILKQRNC PFVIALNKIDRLYMW (SEQ ID NO: 57),
(d) an amino acid sequence comprising at least 20 contiguous amino acid residues of the sequence KLECTVLEVKNIEGLGTTIDVILTNG (SEQ ID NO: 58),
(e) the amino acid sequence of GVGLYVMASTLGSLEALLIFL (SEQ ID NO: 59), or
(f) an amino acid sequence comprising at least 20 contiguous amino acid residues of the sequence MTDVSDVFNHVDKXGVGLYVMASTLGSLEALLIFL (SEQ ID NO: 60), wherein X is a serine (S) residue or a threonine (T) residue,
and wherein each of the one or more isolated polypeptides induces a protective immune response against Plasmodium falciparum and/or Plasmodium vivax in a mammal.

38. The composition of claim 37, which comprises an isolated polypeptide comprising at least 20 contiguous amino acid residues of the sequence LEKKMQLKKEGKLLSAKAKEEKKK (SEQ ID NO: 55).

39. The composition of claim 38, which comprises an isolated polypeptide comprising the amino acid sequence of LEKKMQLKKEGKLLSAKAKEEKKK (SEQ ID NO: 55).

40. The composition of claim 37, which comprises an isolated polypeptide comprising at least 21 contiguous amino acid residues of the sequence IVCILGHVDTGKTKLLDKLRHTNVQDNEAGGITQQIGATFFPKD (SEQ ID NO: 56).

41. The composition of claim 37, which comprises an isolated polypeptide comprising the amino acid sequence of IVCILGHVDTGKTKLLDKLRHTNVQDNEAGGITQQIGATFFPKD (SEQ ID NO: 56)

42. The composition of claim 37, which comprises an isolated polypeptide comprising at least 21 contiguous amino acid residues of the sequence SKGIMIIDTPGHESFYNLRKRGSSLCDIAILVIDLMHGLEQQTKESIQILKQRNCPFVIA LNKIDRLYMW (SEQ ID NO: 57).

43. The composition of claim 42, which comprises an isolated polypeptide comprising the amino acid sequence of SKGIMIIDTPGHESFYNLRKRGSSLCDIAILVIDLMHGLEQQTKESIQILKQRNCPFVIA LNKIDRLYMW (SEQ ID NO: 57).

44. The composition of claim 37, which comprises an isolated polypeptide comprising at least 20 contiguous amino acid residues of the sequence KLECTVLEVKNIEGLGTTIDVILTNG (SEQ ID NO: 58).

45. The composition of claim 44, which comprises an isolated polypeptide comprising the amino acid sequence of KLECTVLEVKNIEGLGTTIDVILTNG (SEQ ID NO: 58).

46. The composition of claim 37, which comprises an isolated polypeptide comprising the amino acid sequence of GVGLYVMASTLGSLEALLIFL (SEQ ID NO: 59).

47. The composition of claim 37, which comprises an isolated polypeptide comprising at least 20 contiguous amino acid residues of the sequence MTDVSDVFNHVDKXGVGLYVMASTLGSLEALLIFL (SEQ ID NO: 60), wherein X is an S residue or a T residue.

48. The composition of claim 47, which comprises an isolated polypeptide comprising at least 20 contiguous amino acid residues of the sequence MTDVSDVFNHVDKSGVGLYVMASTLGSLEALLIFL (SEQ ID NO: 61) or MTDVSDVFNHVDKTGVGLYVMASTLGSLEALLIFL (SEQ ID NO: 62).

49. The composition of claim 48, which comprises an isolated polypeptide comprising the amino acid sequence of MTDVSDVFNHVDKSGVGLYVMASTLGSLEALLIFL (SEQ ID NO: 61) or MTDVSDVFNHVDKTGVGLYVMASTLGSLEALLIFL (SEQ ID NO: 62).

50. The composition of claim 37, which comprises an isolated polypeptide comprising the amino acid sequence of SEQ ID NO: 63, SEQ ID NO: 64, or SEQ ID NO: 65.

51. A composition comprising a pharmaceutically acceptable carrier and one or more isolated polypeptides, wherein each of the one or more isolated polypeptides comprises:
(a) the amino acid sequence of NLFFAKQVIPNACATQAILSI (SEQ ID NO: 69), or
(b) the amino acid sequence of NFDSXMKGLTLSNCXFLRNIHN (SEQ ID NO: 70), wherein X is a serine (S) residue, a threonine (T) residue, or an asparagine (N) residue,
and wherein each of the one or more isolated polypeptides induces a protective immune response against Plasmodium falciparum and/or Plasmodium vivax in a mammal.

52. The composition of claim 51, which comprises an isolated polypeptide comprising the amino acid sequence of NLFFAKQVIPNACATQAILSI (SEQ ID NO: 69).

53. The composition of claim 51, which comprises an isolated polypeptide comprising the amino acid sequence of NFDSXMKGLTLSNCXFLRNIHN (SEQ ID NO: 70), wherein X is an S residue, a T residue, or an N residue.

54. The composition claim 53, which comprises an isolated polypeptide comprising the amino acid sequence of NFDSTMKGLTLSNCNFLRNIHN (SEQ ID NO: 71), NFDSSMKGLTLSNCTFLRNIHN (SEQ ID NO: 72), or NFDSSMKGLTLSNCNFLRNIHN (SEQ ID NO: 73).

55. The composition of claim 51, which comprises an isolated polypeptide comprising the amino acid sequence of SEQ ID NO: 74, SEQ ID NO: 75, or SEQ ID NO: 76.

56. A composition comprising a pharmaceutically acceptable carrier and one or more isolated polypeptides, wherein each of the one or more isolated polypeptides comprises:
(a) the amino acid sequence of SGWKFEEQEGDVNMVLTKNVD (SEQ ID NO: 80),
(b) an amino acid sequence comprising at least 20 contiguous amino acid residues of the sequence IIDFQLVSPFQAEGENEAQAEMTDFSVTVEKPN (SEQ ID NO: 81),
(c) an amino acid sequence comprising at least 20 contiguous amino acid residues of the sequence GGITFYCTTLQNDEKFRYMIGNVKYYKNEEGKNSVS (SEQ ID NO: 82), or
(d) an amino acid sequence comprising at least 21 contiguous amino acid residues of the sequence YNGPEFEDLDDSLQTSLDEWLANLGVDSELCDFIDSCSIDKEQREYM (SEQ ID NO: 83),
and wherein each of the one or more isolated polypeptides induces a protective immune response against Plasmodium falciparum and/or Plasmodium vivax in a mammal.

57. The composition of claim 56, which comprises an isolated polypeptide comprising the amino acid sequence of SGWKFEEQEGDVNMVLTKNVD (SEQ ID NO: 80).

58. The composition of claim 56, which comprises an isolated polypeptide comprising at least 20 contiguous amino acid residues of the sequence IIDFQLVSPFQAEGENEAQAEMTDFSVTVEKPN (SEQ ID NO: 81).

59. The composition of claim 58, which comprises an isolated polypeptide comprising the amino acid sequence of IIDFQLVSPFQAEGENEAQAEMTDFSVTVEKPN (SEQ ID NO: 81)

60. The composition of claim 56, which comprises at least 20 contiguous amino acid residues of the sequence GGITFYCTTLQNDEKFRYMIGNVKYYKNEEGKNSVS (SEQ ID NO: 82).

61. The composition of claim 60, which comprises an isolated polypeptide comprising the amino acid sequence of GGITFYCTTLQNDEKFRYMIGNVKYYKNEEGKNSVS (SEQ ID NO: 82)

62. The composition of claim 56, which comprises at least 21 contiguous amino acid residues of the sequence YNGPEFEDLDDSLQTSLDEWLANLGVDSELCDFIDSCSIDKEQREYM (SEQ ID NO: 83).

63. The composition of claim 62, which comprises an isolated polypeptide comprising the amino acid sequence of YNGPEFEDLDDSLQTSLDEWLANLGVDSELCDFIDSCSIDKEQREYM (SEQ ID NO: 83).

64. The composition of claim 56, which comprises an isolated polypeptide comprising the amino acid sequence of SEQ ID NO: 84, SEQ ID NO: 85, or SEQ ID NO: 86.

65. A composition comprising a pharmaceutically acceptable carrier and one or more isolated polypeptides, wherein each of the one or more isolated polypeptides comprises the amino acid sequence of SEQ ID NO: 90, SEQ ID NO: 91, SEQ ID NO: 92, SEQ ID NO: 93, or SEQ ID NO: 202, and wherein each of the one or more isolated polypeptides induces a protective immune response against Plasmodium falciparum and/or Plasmodium vivax in a mammal.

66. A composition comprising a pharmaceutically acceptable carrier and one or more isolated polypeptides, wherein each of the one or more isolated polypeptides comprises the amino acid sequence of SEQ ID NO: 98, SEQ ID NO: 99, or SEQ ID NO: 100, and wherein each of the one or more isolated polypeptides induces a protective immune response against Plasmodium falciparum and/or Plasmodium vivax in a mammal.

67. A composition comprising a pharmaceutically acceptable carrier and one or more isolated polypeptides, wherein each of the one or more isolated polypeptides comprises:
(a) the amino acid sequence of LLKHGWCEMLKGGVIMDVKX (SEQ ID NO: 104), wherein X is an asparagine (N) residue or a serine (S) residue,
(b) an amino acid sequence comprising at least 20 contiguous amino acid residues of the sequence VEQAKIAEXAGAIGVMVLENIPSELR (SEQ ID NO: 105), wherein X is a lysine (K) residue or a glutamic acid (E) residue,
(c) an amino acid sequence comprising at least 20 contiguous amino acid residues of the sequence SINVLAKVRIGHFVEAQILEELK (SEQ ID NO: 106),
(d) an amino acid sequence comprising at least 27 contiguous amino acid residues of the sequence KHKFKTPFVCGCTNLGEALRRXSEGASMIRTKGEAGTGNII (SEQ ID NO: 107), wherein X is an isoleucine (I) residue or a methionine (M) residue,
(e) an amino acid sequence comprising at least 20 contiguous amino acid residues of the sequence ATPADAAMCMQLGMDGVFVGSGIFESENP (SEQ ID NO: 108), or
(f) an amino acid sequence comprising at least 20 contiguous amino acid residues of the sequence LPVVNFAAGGXATPADAAMCMQLGMDGVFVGSGIFESENP (SEQ ID NO: 109), wherein X is an isoleucine (I) residue or a valine (V) residue,
and wherein each of the one or more isolated polypeptides induces a protective immune response against Plasmodium falciparum and/or Plasmodium vivax in a mammal.

68. The composition of claim 67, which comprises an isolated polypeptide comprising the amino acid sequence of LLKHGWCEMLKGGVIMDVKX (SEQ ID NO: 104), wherein X is an asparagine (N) residue or a serine (S) residue.

69. The composition of claim 68, which comprises an isolated polypeptide comprising the amino acid sequence of LLKHGWCEMLKGGVIMDVKN (SEQ ID NO: 110), or LLKHGWCEMLKGGVIMDVKS (SEQ ID NO: 111).

70. The composition of claim 67, which comprises an isolated polypeptide comprising at least 20 contiguous amino acid residues of the sequence VEQAKIAEXAGAIGVMVLENIPSELR (SEQ ID NO: 105), wherein X is a lysine (K) residue or a glutamic acid (E) residue.

71. The composition of claim 70, which comprises an isolated polypeptide comprising at least 20 contiguous amino acid residues of the sequence VEQAKIAEKAGAIGVMVLENIPSELR (SEQ ID NO: 112), or VEQAKIAEEAGAIGVMVLENIPSELR (SEQ ID NO: 113).

72. The composition of claim 71, which comprises an isolated polypeptide comprising the amino acid sequence of VEQAKIAEKAGAIGVMVLENIPSELR (SEQ ID NO: 112), or VEQAKIAEEAGAIGVMVLENIPSELR (SEQ ID NO: 113)

73. The composition of claim 67, which comprises an isolated polypeptide comprising at least 20 contiguous amino acid residues of the sequence SINVLAKVRIGHFVEAQILEELK (SEQ ID NO: 106).

74. The composition of claim 73, which comprises an isolated polypeptide comprising the amino acid sequence of SINVLAKVRIGHFVEAQILEELK (SEQ ID NO: 106).

75. The composition of claim 67, which comprises an isolated polypeptide comprising at least 27 contiguous amino acid residues of the sequence KHKFKTPFVCGCTNLGEALRRXSEGASMIRTKGEAGTGNII (SEQ ID NO: 107), wherein X is an isoleucine (I) residue or a methionine (M) residue.

76. The composition of claim 75, which comprises an isolated polypeptide comprising at least 27 contiguous amino acid residues of the sequence KHKFKTPFVCGCTNLGEALRRISEGASMIRTKGEAGTGNII (SEQ ID NO: 207), or KHKFKTPFVCGCTNLGEALRRMSEGASMIRTKGEAGTGNII (SEQ ID NO: 208).

77. The composition of claim 76, which comprises an isolated polypeptide comprising the amino acid sequence of KHKFKTPFVCGCTNLGEALRRISEGASMIRTKGEAGTGNII (SEQ ID NO: 207), or KHKFKTPFVCGCTNLGEALRRMSEGASMIRTKGEAGTGNII (SEQ ID NO: 208).

78. The composition of claim 67, which comprises an isolated polypeptide comprising at least 20 contiguous amino acid residues of the sequence ATPADAAMCMQLGMDGVFVGSGIFESENP (SEQ ID NO: 108).

79. The composition of claim 78, which comprises an isolated polypeptide comprising the amino acid sequence of ATPADAAMCMQLGMDGVFVGSGIFESENP (SEQ ID NO: 108).

80. The composition of claim 67, which comprises an isolated polypeptide comprising at least 20 contiguous amino acid residues of the sequence LPVVNFAAGGXATPADAAMCMQLGMDGVFVGSGIFESENP (SEQ ID NO: 109), wherein X is an I residue or V residue.

81. The composition of claim 80, which comprises an isolated polypeptide comprising at least 20 contiguous amino acid residues of the sequence LPVVNFAAGGIATPADAAMCMQLGMDGVFVGSGIFESENP (SEQ ID NO: 114), or LPVVNFAAGGVATPADAAMCMQLGMDGVFVGSGIFESENP (SEQ ID NO: 115).

82. The composition of claim 81, which comprises an isolated polypeptide comprising the amino acid sequence of LPVVNFAAGGIATPADAAMCMQLGMDGVFVGSGIFESENP (SEQ ID NO: 114), or LPVVNFAAGGVATPADAAMCMQLGMDGVFVGSGIFESENP (SEQ ID NO: 115).

83. The composition of claim 67, which comprises an isolated polypeptide comprising the amino acid sequence of SEQ ID NO: 116, SEQ ID NO: 117, SEQ ID NO: 118 or SEQ ID NO: 205.

84. A composition comprising a pharmaceutically acceptable carrier and one or more isolated nucleic acid sequences, wherein each of the one or more nucleic acid sequences encodes a polypeptide comprising the amino acid sequence of any one of SEQ ID NO: 1-SEQ ID NO: 16, SEQ ID NO: 20-SEQ ID NO: 26, SEQ ID NO: 30-SEQ ID NO: 36, SEQ ID NO: 40-SEQ ID NO: 51, SEQ ID NO: 55-SEQ ID NO: 65, SEQ ID NO: 69-SEQ ID NO: 76, SEQ ID NO: 80-SEQ ID NO: 86, SEQ ID NO: 90-SEQ ID NO: 93, SEQ ID NO: 98-SEQ ID NO: 100, SEQ ID NO: 104-SEQ ID NO: 118, SEQ ID NO: 202, SEQ ID NO: 205, SEQ ID NO: 207-SEQ ID NO: 209, SEQ ID NO: 211, or SEQ ID NO: 212, and wherein each of the one or more isolated polypeptides induces a protective immune response against Plasmodium falciparum and/or Plasmodium vivax in a mammal.

85. The composition of claim 84, which comprises the isolated nucleic acid sequence of any one of SEQ ID NO: 17, SEQ ID NO: 18, SEQ ID NO: 19, SEQ ID NO: 27, SEQ ID NO: 28, SEQ ID NO: 29, SEQ ID NO: 37, SEQ ID NO: 38, SEQ ID NO: 39, SEQ ID NO: 52, SEQ ID NO: 53, SEQ ID NO: 54, SEQ ID NO: 66, SEQ ID NO: 67, SEQ ID NO: 68, SEQ ID NO: 77, SEQ ID NO: 78, SEQ ID NO: 79, SEQ ID NO: 87, SEQ ID NO: 88, SEQ ID NO: 89, SEQ ID NO: 94, SEQ ID NO: 95, SEQ ID NO: 96, SEQ ID NO: 97, SEQ ID NO: 101, SEQ ID NO: 102, SEQ ID NO: 103, SEQ ID NO: 119, SEQ ID NO: 120, SEQ ID NO: 121, SEQ ID NO: 203, SEQ ID NO: 204, SEQ ID NO: 206, or SEQ ID NO: 210.

86. The composition of claim 84, wherein the one or more isolated nucleic acid sequences are present in a vector.

87. The composition of claim 86, wherein the vector is an adenoviral vector.

88. The composition of claim 87, wherein the adenoviral vector is a human adenoviral vector or a gorilla adenoviral vector.

89. The composition of claim 87, wherein the adenoviral vector requires complementation of a deficiency in one or more early regions of the adenoviral genome for propagation and does not require complementation of any other deficiency of the adenoviral genome for propagation.

90. The composition of claim 89, wherein the one or more early regions are selected from the group consisting of the E1 region, the E2 region, and the E4 region of the adenovirus genome.

91. The composition of claim 89, wherein the adenoviral vector requires complementation of a deficiency in the E1 region of the adenoviral genome for propagation and does not require complementation of any other deficiency of the adenoviral genome for propagation.

92. The composition of claim 89, wherein the adenoviral vector requires complementation of a deficiency in the E1A region or the E1B region of the adenoviral genome for propagation and does not require complementation of any other deficiency of the adenoviral genome for propagation.

93. The composition of claim 89, wherein the adenoviral vector requires at most complementation of a deficiency in the E4 region of the adenoviral genome for propagation and does not require complementation of any other deficiency of the adenoviral genome for propagation.

94. The composition of claim 89, wherein the adenoviral vector requires complementation of a deficiency in the E1 region of the adenoviral genome and a deficiency in the E4 region of the adenoviral genome for propagation and does not require complementation of any other deficiency of the adenoviral genome for propagation.

95. A method of inducing a protective immune response against a Plasmodium parasite in a mammal, which method comprises administering to the mammal the composition of claim 84, whereupon a protective immune response against the Plasmodium parasite in the mammal is induced.

96. The method of claim 95, wherein the mammal is a human.

97. The method of claim 95, wherein the Plasmodium parasite is Plasmodium falciparum or Plasmodium vivax.

98. The method of claim 95, wherein the composition comprises the isolated nucleic acid sequence of any one of SEQ ID NO: 17, SEQ ID NO: 18, SEQ ID NO: 19, SEQ ID NO: 27, SEQ ID NO: 28, SEQ ID NO: 29, SEQ ID NO: 37, SEQ ID NO: 38, SEQ ID NO: 39, SEQ ID NO: 52, SEQ ID NO: 53, SEQ ID NO: 54, SEQ ID NO: 66, SEQ ID NO: 67, SEQ ID NO: 68, SEQ ID NO: 77, SEQ ID NO: 78, SEQ ID NO: 79, SEQ ID NO: 87, SEQ ID NO: 88, SEQ ID NO: 89, SEQ ID NO: 94, SEQ ID NO: 95, SEQ ID NO: 96, SEQ ID NO: 97, SEQ ID NO: 101, SEQ ID NO: 102, SEQ ID NO: 103, SEQ ID NO: 119, SEQ ID NO: 120, SEQ ID NO: 121, SEQ ID NO: 203, SEQ ID NO: 204, SEQ ID NO: 206, or SEQ ID NO: 210.
